(19) United States
(12) Patent Application Publication
(10) Pub. No.: US 2019/0225651 A1
(43) Pub. Date: Jul. 25, 2019

(54) COMPOUNDS FOR INDUCING TISSUE FORMATION AND USES THEREOF

(71) Applicant: HISTIDE AG, Schindellegi (CH)

(72) Inventor: Omar F. ZOUANI, Einsiedeln (CH)

(21) Appl. No.: 15/745,010

(22) PCT Filed: Aug. 25, 2016
(86) PCT No.: PCT/EP2016/070135

§ 371 Date: Jan. 15, 2018

Related U.S. Application Data
(60) Provisional application No. 62/209,422, filed on Aug. 25, 2015.

(51) Int. Cl. C07K 7/64; A61Q 19/08; C07K 14/51; A61Q 7/00; A61K 8/64; A61P 19/00; A61K 35/28; C12N 5/0775

(52) U.S. Cl. CPC C07K 7/64; A61Q 19/08; C07K 14/51; A61Q 7/00; A61K 38/00; A61P 19/00; A61K 35/28; C12N 5/0663; A61K 8/64

(57) ABSTRACT

The present disclosure provides a cyclic peptide, or a variant or analog thereof, or a cyclic peptidomimetic, with between 10 and 35 amino acids, having a growth factor receptor-binding capability and comprising a peptide with four amino acids PEP1; wherein PEP1 is selected from the group consisting of SAIS, SSLS, NAIS, SATS, SPIS, EPIS, SPIN, KPLS, EPLP, EPLT, SNIT, RSVK and RPVQ.

### FIELD OF THE INVENTION

[0001] The invention relates to compounds for inducing tissue formation, biomaterials and medical devices comprising such compounds, such compounds for use in medical methods and use of such compounds in non-medical methods.

### BACKGROUND

[0002] Tissue regeneration forms an important part of the healing process subsequent to disease, trauma, or surgery. In situations where disease or trauma produces a tissue defect, for example a bone, cartilage, skin, vascular tissue, or eye retina defect, tissue regeneration is a central goal of recovery. It is not, however, a goal that is always or easily achieved and much research has been devoted to newer and more effective ways to promote tissue repair and regeneration. Conventional technics to achieve tissue regeneration involve the activation of tissue-specific stem cells present in adult tissues with repair and/or regenerative capabilities called mesenchymal stem cell(s) or MSC(s) using recombinant proteins called growth factors (GFs). MSCs or MSC-like cells may be found in the bone marrow, but also in tissues such as fat, umbilical cord blood, amniotic fluid, placenta, dental pulp, tendons, synovial membrane and skeletal muscle. Natural regulation of the MSCs is effected through the participation of a number of growth factors (GFs), including vascular endothelial growth factors (VEGF), which trigger angiogenesis crucial for the repair of most tissues, bone morphogenetic proteins (BMP), which induce the formation of new bone and regulate capillary stem cell activation, transforming growth factors (TGF), which induce cartilage formation, and platelet-derived growth factor-BB (PDGF-BB), which is involved in the formation of granulation tissues and the recruitment of stem cells. Naturally occurring growth factors are found within the tissues themselves and are only present in small amounts. Thus, to provide industrially useful and reproducible amounts of human growth factors, traditional technics involve the production of GFs by genetic recombination. These recombinant molecules are typically grafted onto the surface of a biocompatible material and placed, where needed, inside or on the body of a patient.

[0003] Bone

[0004] It is conventionally known that mature osteoblasts are the cells responsible for bone formation and are derived from osteoblast precursors. Differentiation of human bone marrow mesenchymal stem cells and osteoblast precursors is one of the important processes for bone regeneration. Osteoblasts differentiate from mesenchymal stem cells. Mature osteoblasts differentiate from osteoblast precursors and into osteocytes which are non-dividing cells. Upon cell activation osteoblasts begin to secrete some extracellular matrix around themselves. Calcification, i.e., deposition of insoluble calcium salts in the bone matrix, begins a short time after the matrix has been secreted. Upon termination of bone matrix synthesis, osteoblasts either undergo cell death by apoptosis or differentiate into osteocytes or bone lining cells. Mesenchymal stem cells are found in large numbers in the periosteum, the fibrous-like layer on the outside surface of bones, and in the bone marrow. During cellular differentiation of osteoblasts, the developing progenitor cells express the regulatory transcription factor Cbfa1/Runx2. A second important transcription factor required for osteoblastic differentiation is osterix. Osteoprogenitors differentiate under the influence of growth factors. Important growth factors in skeletal differentiation include bone morphogenetic proteins (BMPs), transforming growth factor beta (TGF-β) and fibroblast growth factors (FGFs). Differentiation of osteoblasts is also characterized by the expression of alkaline phosphatase as an early marker of pre-osteoblasts. As a result, acting on the differentiation cycle of mammal bone marrow mesenchymal stem cells and osteoblast precursors may have applications in bone tissue regeneration.

[0005] Osteoporosis

[0006] Osteoporosis is a progressive bone disease that is characterized by a decrease in bone mass and density which can lead to an increased risk of fracture. In osteoporosis, the bone mineral density (BMD) is reduced, bone microarchitecture deteriorates, and the amount and variety of proteins in bone are altered. Osteoporosis is defined by the World Health Organization as a bone mineral density of 2.5 standard deviations or more below the mean peak bone mass (average of young, healthy adults) as measured by dual-energy X-ray absorptiometry; the term “established osteoporosis” includes the presence of a fragility fracture. The treatment of osteoporotic fractures is often hindered by reduced bone healing and higher rates of complications. Studies in osteoporotic animal models revealed delayed callus formation and enchondral ossification, resulting in impaired biomechanical properties of the bone. The cellular sources of fracture healing are mesenchymal stem cells (MSCs). MSCs migrate to the fracture site, where they proliferate and differentiate into osteoblasts upon stimulation with osteoinductive cytokines. Molecular biological alterations of MSCs, such as decreased proliferative capacity, production of collagen I deficient matrix, preferableness of adipogenic differentiation, and impaired osteogenic differentiation have been described in osteoporotic patients. With regards to the osteoinduction of MSCs, key agents are BMPs. Of these, BMP-2 is one of the most potent osteoinductive cytokines which physiologically contributes to the early phase of fracture healing. Beyond that, BMP-2 is already clinically approved for the treatment of distinct fracture entities. The predominant role of BMP-2 in osteoinduction and bone formation led to a scientific quest regarding its involvement in the pathophysiology of osteoporosis. Osteoporotic animal models revealed inconsistent data with regard to BMP-2 expression levels. BMP-2 was found to be overexpressed in the callus of mandibles and down-regulated in MSCs derived from tibial and femoral bone. In humans, genetic polymorphisms in BMP-2 have been identified as risk factors for the development of familial osteoporosis and osteoporotic fractures. All these findings directly link the BMP pathways to osteoporosis. Other studies investigated the therapeutic potential of BMP-2 in osteoporotic animal models. The systemic administration of rhBMP-2 increased the volume of trabecular bone and stimulated bone formation in osteoporotic mice. The local application of adenoviral BMP-2 at the site of injury enhanced callus formation and improved mechanical properties of the healing bone in osteoporotic sheep. Stimulating the differentiation of MSCs and/or inducing growth factor activity, in particular of BMPs, may thus lead to the development of new osteoporosis treatments.

[0007] Cartilage

[0008] Although native chondrocytes offer little assistance to injured articular cartilage, these cells are responsible for the synthesis and turnover of the cartilage extracellular matrix (ECM), which provides an environment of nutrition diffusion for chondrocytes and provides the joint surface with biomechanical competence. Chondrogenic cells arise from pluripotential adult mesenchymal stem cells (MSCs) through a series of differentiation pathways. Subsequently, it was shown that a number of cytokines and transcription factors are involved in chondrocyte maturation and cartilage formation. Chondrogenic differentiation of MSCs is induced by various intrinsic and extrinsic factors. Growth factors play the most important role in this process. They represent a group of biologically active polypeptides produced by the body, which can stimulate cell proliferation, differentiation and maturation. In the hyaline cartilage, growth factors regulate homeostasis and integrity, as well as development. Important growth factors intervening in cartilage regeneration include TGF-β1, TGF-β3, BMP-2, BMP-4, BMP-7 and GDF-5. As a result, acting on the differentiation cycle of mammal mesenchymal stem cells and chondroblast precursors may have applications in cartilage tissue regeneration.

[0009] Muscles

[0010] Skeletal muscle is a highly complex and heterogeneous tissue serving a multitude of functions in the organism. The process of generating muscle—myogenesis—can be divided into several distinct phases. During embryonic myogenesis, mesoderm-derived structures generate the first muscle fibers of the body proper, and in subsequent waves additional fibers are generated along these template fibers. In the perinatal phase, muscle resident myogenic progenitors initially proliferate extensively but, later on, decrease as the number of myonuclei reaches a steady state and myofibrillar protein synthesis peaks. Once the muscle has matured, these progenitors will enter quiescence and henceforth reside within it as satellite cells. Adult skeletal muscle, like all renewing organs, relies on a mechanism that compensates for the turnover of terminally differentiated cells to maintain tissue homeostasis. This type of myogenesis depends on the activation of satellite cells that have the potential to differentiate into new fibers. The most comprehensively studied form of myogenesis takes place when mature muscle is damaged and large cohorts of satellite cells expand mitotically and differentiate to repair the tissue and reestablish homeostasis. Many similarities, such as common transcription factors and signaling molecules, between embryonic myogenesis and regeneration in the mature skeletal musculature have been discovered. It is now generally accepted that satellite cells are closely related to progenitors of somitic origin. The activation of the network of transcription factors that controls skeletal muscle development depends on paracrine factors that are released by adjacent tissues, such as the neural tube, notochord, surface ectoderm and lateral mesoderm. Several secreted factors have been identified that determine the spatial and temporal onset of myogenesis. However, no consensus has been reached as to whether these molecules instruct naive cells (instructive induction), amplify a pool of committed progenitors and/or enable a default differentiation pathway (permissive induction) or primarily prevent programmed cell death of muscle progenitor cells. Sonic hedgehog (SHH) and WNT signaling have been reported to have pivotal roles in the induction of myogenesis. Likewise, other signalling molecules, such as Noggin and bone morphogenetic proteins (BMPs)—which inactivate and activate receptors of the transforming growth factor-β (TGFβ) superfamily, respectively—are known to play an important part in orchestrating the activation of myogenesis.

[0011] Vascular

[0012] The vasculature in the human body forms through two distinct processes: vasculogenesis and angiogenesis. Vasculogenesis is defined as the process of de novo blood vessel formation occurring when endothelial precursor cells (angioblasts) migrate and differentiate into endothelial cells which form the new vessel. These vascular trees are then extended through angiogenesis which is defined as the new vessel formation secondary to proliferation of endothelial cells from pre-existing vessels. Vasculogenesis as well as angiogenesis occur during the embryologic development of the circulatory system but also in the adult organism from circulating endothelial progenitor cells (derivatives of stem cells) able to contribute, albeit to varying degrees, to neovascularization. An example of where these processes can occur in adults is the revascularization following trauma, e.g., after cardiac ischemia. It is known that the ablation of the endothelial progenitor cells (EPCs) in the bone marrow leads to a significant decrease in the vasculature development which would place endothelial progenitor cells as a novel therapeutic target. The differentiation of the EPCs is a consequence of the interplay amongst different signaling molecules such as growth factors. These include FGF, VEGF, PDGF and others. Vascular endothelial growth factor (VEGF) is a signal protein produced by cells that stimulates vasculogenesis and angiogenesis. It is part of the system that restores the oxygen supply to tissues when blood circulation is inadequate. VEGF is a sub-family of growth factors, to be specific, the platelet-derived growth factor family of cystine-knot growth factors. VEGF causes an important signaling cascade in endothelial cells. Binding to VEGF receptor-2 (VEGFR-2) starts a tyrosine kinase signaling cascade that stimulates the production of factors that variously stimulate vessel permeability, proliferation/survival, migration and finally differentiation into mature blood vessels. Recent reports have also indicated that different somatic cells (other than the EPCs) could be reprogrammed towards distinct endothelial cell lineages. This somatic reprogramming as well as the stimulation of EPCs differentiation, both represent promising therapeutic targets in regenerative vascular medicine.

[0013] Wound Healing

[0014] Wound healing is a complex and dynamic process of replacing devitalized and missing cellular structures and tissue layers. Upon injury to the skin, a set of complex biochemical events takes place in a closely orchestrated cascade to repair the damage and restore the protective barrier which in the normal skin is formed by the epidermis (outermost layer) and the dermis (inner or deeper layer) which exist in a steady-state equilibrium. The human adult wound healing process can be divided into 4 distinct phases: hemostasis, inflammatory, fibroblastic, and maturation (or remodeling). These phases are initiated and regulated by various secreted factors such as growth factors. In the first phase, the damaged blood vessels are sealed via different substances secreted by the platelets such as the platelet-derived growth factor (PDGF). The second phase corresponds to an inflammatory response which causes the blood vessels to become leaky thus releasing plasma and PMN's into the surrounding tissue. The neutrophils phagocytize debris and microorganisms and provide the first line of defence against infection. The cells macrophages are able to phagocytize bacteria and provide a second line of defence. They also secrete a variety of chemotactic and growth factors such as fibroblast growth factor (FGF), epidermal growth factor (EGF), transforming growth factor beta (TGF β and interleukin-1 (IL-1) which appears to direct the next stages of wound healing. The third phase involves the replacement of dermal and subdermal tissues. The fibroblasts secrete the collagen framework onto which further dermal regeneration occurs. The pericytes which regenerate the outer layers of capillaries and the endothelial cells which produce the lining are involved in the angiogenesis. The keratinocytes are responsible for the epithelialization. In the final stage of epithelializtion, contracture occurs as the keratinocytes differentiate to form the protective outer layer or stratum corneum. The last and 4th phase of wound healing involves remodeling the dermal tissues to produce greater tensile strength. The principle cells involved in this process are the fibroblasts. For a wound to heal successfully, all four phases must occur in the proper sequence and time frame. Many factors can interfere with one or more phases of this process, thus causing improper or impaired wound healing. Recent research has also shown that adult stem cells could be involved in wound healing. In particular hematopoietic progenitor cells (that give rise to mature cells in the blood) may have the ability to de-differentiate back into hematopoietic stem cells and/or trans-differentiate into non-lineage cells, such as fibroblasts. It is thought that the extent of the stem cell involvement in skin wound healing is complex as the epidermis and dermis could be reconstituted by mitotically active stem cells that reside at the apex of rete ridges (basal stem cells or BSC), the bulge of hair follicles (hair follicular stem cell or HFSC), and the papillary dermis (dermal stem cells). Moreover, the bone marrow may also contain stem cells that could play a major role in cutaneous wound healing. Therefore, activating adult stem cells as well as the different cells and growth factors intervening during the four phases of the skin wound healing process, most certainly represents a promising therapeutic target.

[0015] Tissue Closure

[0016] Wound healing not only applies to skin tissue repair but also to the closure of all tissue layers damaged e.g. in an injury or during surgery. For instance, during bone repair surgery, the different layers of tissues incised in order for the surgeon to reach the damaged bone part and repair it would all need to be closed for the overall healing process to occur. The mediation of this complex, “multi-layered” healing process, involves the participation of many different factors such as growth factors.

[0017] Neurons

[0018] For a long time, the human nervous system has been considered fixed and incapable or regeneration since neurons do not divide within the central nervous system (CNS). Recently in has been discovered that neural cells can be regenerated from neural stem cells (NSCs). These are self-renewing, multipotent adult stem cells that generate the main phenotype of the nervous system. They undergo asymmetric cell division into two daughter cells, one non-specialized and one specialized. NSCs primarily differentiate into neurons, astrocytes, and oligodendrocytes. NSCs are generated throughout an adult's life via the process of neurogenesis. NSCs can be differentiated to replace lost or injured neurons or in many cases even glial cells. NSCs are stimulated to begin differentiation via exogenous cues from their microenvironment, or the neural stem cell niche. This niche defines a zone in which stem cells are retained after embryonic development for the production of new cells of the nervous system. This continual supply of new neurons and glia then provides the postnatal and adult brain with an added capacity for cellular plasticity. Critical to the maintenance of the stem cell niche are microenvironmental cues and cell-cell interactions that act to balance stem cell quiescence with proliferation and to direct neurogenesis versus gliogenesis lineage decisions. Several proteins like different growth factors are involved in the mechanisms of the neural stem cell niche as well as in the maintenance and growth of the newly formed neurons. These include the BMPs, FGFs, PDGF, VEGF, TGF β, BDNF and others. Nerve growth factor (NGF) is a small secreted protein that is important for the growth, maintenance, and survival of certain target neurons (nerve cells). It also functions as a signaling molecule. While “nerve growth factor” refers to a single factor, “nerve growth factors” refers to a family of factors also known as neurotrophins. Other members of the neurotrophin family that are well recognized include Brain-Derived Neurotrophic Factor (BDNF), Neurotrophin-3 (NT-3), and Neurotrophin 4/5 (NT-4/5). NGF is critical for the survival and maintenance of sympathetic and sensory neurons. Without it, these neurons undergo apoptosis. Nerve growth factor causes axonal growth. Studies have shown that it causes also axonal branching and elongation. Several brain diseases are considered to be caused by disorders in the neural stem cell niche and especially in the precise signaling of this microenvironment. Therefore restoring correct growth factor signaling is a promising target for the treatment of brain diseases.

[0019] Eye Retina

[0020] The vertebrate retina is a light-sensitive layer of tissue, lining the inner surface of the eye. Light striking the retina initiates a cascade of chemical and electrical events that ultimately trigger nerve impulses. These are sent to various visual centers of the brain through the fibers of the optic nerve. In vertebrate embryonic development, the retina and the optic nerve originate as outgrowths of the developing brain, so the retina is considered part of the central nervous system (CNS) and is actually brain tissue. Retinal development involves a complex progression of tissue induction, proliferation of retinal progenitor cell (RPC) populations and terminal differentiation of these cells into specific functional types. Growing evidence indicates that several extrinsic cues play a critical role in the retinal cell development. One such extrinsic molecule type, bone morphogenetic protein (BMP), is a member of the transforming growth factor (TGF)-β family of signaling molecules, which are known to regulate a variety of cell functions in the developing nervous system, including neural induction, cell fate determination, apoptosis, and proliferation. BMP-2, -4, and -7 and their receptors (BMPRs) are expressed in the eye during embryogenesis and are essential for multiple aspects of retinal development. There are many inherited and acquired diseases or disorders that may affect the retina like for example the macular degeneration. It is a degenerative disease that usually affects older adults and results in a loss of vision in the center of the visual field (the macula) because of damage to the retina. Age-related macular degeneration is the leading cause of irreversible blindness in North America. Regenerating the retina via the growth factor signaling responsible for its development is thus a significant potential therapeutic target.

[0021] Kidneys

[0022] The kidney is a complex tissue consisting of several different cell types including glomerular podocytes, endothelial cells, mesangial cells, interstitial cells, tubular epithelial cells, and connecting duct cells. These cell types interact to establish a precise cellular environment that functions as an efficient tissue. Kidney diseases are currently a global public health problem, with an incidence that has reached epidemic proportions and continues to climb worldwide. Kidney failure can be associated with chronic kidney disease (CKD), which is a progressive loss in renal function over a period of months or years. Renal fibrosis, the common pathological feature of CKDs, is characterized by excessive accumulation of ECM (extracellular matrix). TGF-β (transforming growth factor-β) and BMP-7 (bone morphogenetic protein-7), two key members in the TGF-β superfamily, play important but diverse roles in CKDs (chronic kidney diseases). Both TGF-β and BMP-7 share similar downstream Smad signalling pathways, but counter-regulate each other to maintain the balance of their biological activities. During renal injury in CKDs, this balance is significantly altered because TGF-β signalling is up-regulated by inducing TGF-β1 and activating Smad3, whereas BMP-7 and its downstream Smad1/5/8 are down-regulated. In the context of renal fibrosis, Smad3 is pathogenic, whereas Smad2 and Smad7 are renoprotective. However, this counter-balancing mechanism is also altered because TGF-β1 induces Smurf2, an ubiquitin E3-ligase, to target Smad7 as well as Smad2 for degradation. Thus overexpression of renal Smad7 restores the balance of TGF-β/Smad signaling and has therapeutic effect on CKDs. It may this be that restoring the BMP-7 signaling is a potential therapeutic target in renal regenerative therapies.

[0023] Ligaments and Tendons

[0024] Tendons and ligaments (T/L) are dense connective tissues of mesodermal origin. They connect and transmit force from muscle to bone and bone to bone, respectively. Both tissues are able to store elastic energy and withstand hightensile forces, on which locomotion is entirely dependent. T/L are predominantly composed of collagen type I fibrils organized in a highly hierarchical manner that is unique for the T/L. Other collagens (types XI, XII, XIV, and XV) and various proteoglycans (decorin, cartilage oligomeric matrix protein (COMP), byglican, lumican, fibromodulin, tenascin-C, etc.) are building the remaining T/L substance. The cellular content of T/L is dominated by tendon-specific fibroblasts named tenocytes. During embryonic development, the tendon-specific cells descend from a sub-set of mesenchymal progenitors condensed in the syndetome, a dorsolateral domain of the sclerotome. Moreover, Mesenchymal stem cells (MSCs), multipotent adult cells that give rise to tissues of mesodermal origin, have been shown to generate in vitro T/L progenitor cells. Several tendon injuries result from gradual wear and tear to the tendon from overuse or aging. Tendon healing is a complex and highly-regulated process that is initiated, sustained and eventually terminated by a large number and variety of molecules. Growth factors represent one of the most important molecule families involved in regeneration. The activity of five growth factors has been best characterized during this process: insulin-like growth factor-I (IGF-I), transforming growth factor beta (TGFbeta), vascular endothelial growth factor (VEGF), platelet-derived growth factor (PDGF), and basic fibroblast growth factor (bFGF). Stimulating the differentiation of MSCs and/or inducing growth factor activity thus represent two potentially significant therapeutic targets in T/L regeneration and healing.

[0025] Fertility and Reproduction

[0026] Reproduction (or procreation) is the biological process by which new offspring individual organisms are produced from their parents. Sexual reproduction is a biological process by which organisms create descendants that have a combination of genetic material contributed from two (usually) different members of the species. Fertility is the natural capability to produce offspring. The development and physiological functions of basic structures in the mammalian reproductive system are influenced by the tissue-specific expression of members of different growth factors families like the BMP family. The establishment of the germ line is a fundamental aspect of reproduction. Germ cell determination is induced in epiblast cells by the extraembryonic ectoderm, and is not acquired through the inheritance of preformed germ plasma. There is some strong evidence that BMP-4 and -8b play a central role in determining primordial germ cell (PGC) formation in the embryo. The genes encoding BMP-4 and -8b have overlapping expression in the extraembryonic ectoderm before gastrulation, i.e., before PGCs are seen. Thus, PGC formation requires BMP-4 expression. There is also evidence from knockout mammals that BMP-8b is required for PGC formation. Furthermore, there is increasing evidence that locally produced BMPs play a major role in the differentiation of the pituitary gonadotrope. Restoring the BMPs signaling would thus be an important factor in infertility therapies.

[0027] Hair

[0028] Tissue homeostasis and regeneration are regulated through balancing quiescence and activation of quiescent epithelial stem cells (SCs). Hair follicles (HFs) follow this process. Throughout adult life, they undergo dynamic, synchronized cycles of degeneration (catagen), quiescence (telogen), and regeneration (anagen). During telogen, which can last for months, HFSCs are quiescent and reside within a specialized microenvironment called the bulge. Within this niche, HFSCs surround the hair shaft produced in the previous cycle. Throughout telogen, the base of the bulge, called the secondary hair germ (HG), directly abuts the underlying mesenchymal dermal papillae (DP), a key signaling center for HFSCs. The telogen/anagen transition relies upon DP-HFSC crosstalk to generate the necessary threshold of activating factors. Upon activation, HFSCs in the HG are the first to proliferate and initiate HF regeneration, whereas HFSCs within the bulge become active several days later. As the new HF emerges, the DP stimulus is pushed increasingly further from niche SCs, which return to quiescence. In contrast, throughout anagen, relatively undifferentiated bulge cell progeny along the outer root sheath (ORS) accelerate proliferation as they approach the DP. This fuels a steady production of transiently amplifying matrix cells, which undergo a few divisions while in contact with DP and then terminally differentiate to form the hair and inner root sheath (IRS). At the anagen/catagen transition, matrix cells apoptosis and the DP retracts upward along with the dying/differentiating epithelial strand. As the HF reenters telogen, growth factors from the inner layer of non-SC niche cells and from surrounding dermal tissue impose a threshold, which must be overcome to initiate the next cycle. When cells in the telogen phase are not able to reenter into the anagen phase, hair stop their growth, and conditions such as hair loss emerge. As a result, acting on the differentiation cycle of mammal hair follicle mesenchymal stem cells and precursor cells may have applications in hair follicle tissue regeneration thus preventing hair-loss and activating hair-growth, preventing/treating alopecia areata, alopecia totalis, alopecia universalis, androgenic alopecia (male pattern baldness), telogen effluvium, anagen effluvium or chemotherapy-induced alopecia, but is not limited.

[0029] Skin

[0030] The skin constantly renews itself throughout adult life. Stem cells (SCs) residing in the epidermis ensure the maintenance of adult skin homeostasis, but they also participate in the repair of the epidermis after injuries. The skin protects the body from dehydration, injury and infection. The skin consists of an underlying dermis, separated by a basement membrane from the multilayered overlaying epidermis. The dermis is of mesodermal embryonic origin and contains as adult stem cells fibroblastic mesenchymal stem-cell-like cells. These cells have a multi-lineage differentiation potential, being also able to form adipose tissue or bones. The stratified epidermis is of ectodermal origin and composed of keratinocytes that differentiate to a water-impermeable stratum corneum. The terminally differentiated cells in the epidermis are shed from the skin, necessitating a continuous delivery of newly differentiating cells. The epidermis is completely renewed about every four weeks. Given that the differentiated cells cannot divide anymore, their replacement depends on epidermal stem cells. There is strong evidence that the hair bulge forms a reservoir of epidermal stem cells. From there, stem cells periodically migrate to the matrix of the hair follicle, the sebaceous gland and the basal layer in the interfollicular epidermis to produce progenitors that differentiate into hair cells, gland cells or cells of the upper epidermal layers respectively.

[0031] The basal layer of the epidermis contains two different types of cell populations: (I) the slowly dividing epidermal stem cells and (II) their progeny that are rapidly dividing cells in order to supply new cells to replace those that get lost by desquamation. The basal layer of the epidermis contains two different types of cell populations: (I) the slowly dividing epidermal stem cells and (II) their progeny that are rapidly dividing cells in order to supply new cells to replace those that get lost by desquamation. In the skin, Wnt and β-catenin play diverse roles in HF (Hair Follicle) morphogenesis, Stem Cells maintenance and/or activation and hair shaft differentiation. Activation of Wnt/β-catenin signaling is critical during the first stage of HF morphogenesis, as evidenced by the absence of placode formation on conditional ablation of β-catenin or constitutive expression of a soluble Wnt inhibitor (Dkk1). Although the source and identity of the putative Wnt signal required to induce placode formation remain elusive, it may be the first dermal signal to instruct epidermal cells to make hair. Consistent with this notion is the activation in both the placode and the postnatal hair germ of a Wnt reporter gene driving lacZ under the control of an enhancer composed of multimerized binding sites for the Lef1/Tcf DNA-binding proteins that interact with and are activated by association with β-catenin. Nuclear β-catenin and Left expression are also seen in embryonic placodes and postnatal hair germs at this time. Noggin, a soluble inhibitor of BMPs, is expressed by the mesenchymal condensate and is required in the early stage of HF morphogenesis and cycling. It appears to act at least in part by promoting expression of Left. Skin stem cells are of special interest because they are easily accessible. In recent years, several products said to have a link with skin stem cells have found their way to the cosmetic products market such as AMATOKIN®, a face care product line commercialised by Voss Laboratories and said to stimulate stem cells in the skin, or Dior's CAPTURE® R60/80 XP product line used as anti-wrinkles whose mechanism is said to be based on the protection of the life force of stem cells. As a result, there is thus some potential in acting on the differentiation cycle of mammal skin mesenchymal stem cells and precursor cells with potential applications in skin tissue regeneration thus preventing wrinkles formation and generally improving skin appearance.

[0032] Blood

[0033] Blood is a bodily fluid in animals that delivers necessary substances such as nutrients and oxygen to the cells and transports metabolic waste products away from those cells. When it reaches the lungs, gas exchange occurs wherein carbon dioxide is diffused out of the blood into the alveoli and oxygen is diffused into the blood. This oxygenated blood is pumped to the left hand side of the heart in the pulmonary vein and enters the left atrium. From here it passes through the bicuspid valve, through the ventricle and taken all around the body by the aorta. Blood contains antibodies, nutrients, oxygen and much more to help the body work. In vertebrates, it is composed of blood cells suspended in blood plasma. Plasma, which constitutes 55% of blood fluid, is mostly water (92% by volume), and contains dissipated proteins, glucose, mineral ions, hormones, carbon dioxide (plasma being the main medium for excretory product transportation), and blood cells themselves. Albumin is the main protein in plasma, and it functions to regulate the colloidal osmotic pressure of blood. Hematopoietic stem cells (HSCs) are the blood cells that give rise to all the other blood cells and are derived from the mesoderm. They are located in the red bone marrow, which is contained in the core of most bones. The HSCs give rise to the myeloid lineage (monocytes and macrophages, neutrophils, basophils, eosinophils, erythrocytes, megakaryocytes/platelets, dendritic cells), and to the lymphoid lineages (T-cells, B-cells, NK-cells). The most abundant cells in the vertebrate blood are red blood cells (also called RBSs or erythrocytes). These contain hemoglobin, an iron-containing protein, which facilitates oxygen transport by reversibly binding to this respiratory gas and greatly increasing its solubility in blood. Blood cell degeneration-related diseases, conditions or disorders include, but are not limited to, Anemia, Iron-deficiency anemia, Anemia of chronic disease, Pernicious anemia, Aplastic anemia, Autoimmune hemolytic anemia, Thalassemia, Sickle cell anemia, Polycythemia vera, Vitamin deficiency anemia, Hemolytic anemia, Thrombocytopenia, Idiopathic thrombocytopenic purpura, Heparin-induced thrombocytopenia, Thrombotic thrombocytopenic purpura, Essential thrombocytosis (primary thrombocythemia), Thrombosis, Hemophilia, von Willebrand disease, Hypercoaguable state (hypercoagulable state), Deep venous thrombosis, Disseminated intravascular coagulation (DIC), Thrombocytopenia, Immune Thrombocytopenia (ITP), Drug-induced thrombocytopenia (DITP), Gestational thrombocytopenia, Thrombotic microangiopathies (TMA), Drug-induced thrombotic microangiopathies, Complement-mediated thrombotic microangiopathies, Mixed cryoglobulinemia, Eosinophilia, Eosinopenia, Idiopathic hypereosinophilic syndrome, Antiphospholipid syndrome (Hughes syndrome), Glanzmann's thrombasthenia, Wiskott-Aldrich syndrome (WAS), Leishmania infection, Toxoplasmosis, Hereditary hypogammaglobulinemia, Nonfamilial hypogammaglobulinemia, Leukopenia, Agranulocytosis, Basopenia, Bernard-Soulier syndrome (BSS), Malaria, Sepsis, or Hemolytic uremic syndrome (HUS).

[0034] Adipose Tissue

[0035] Adipose tissue is loose connective tissue composed mostly of adipocytes. In addition to adipocytes, adipose tissue contains the stromal vascular fraction (SVF) of cells including preadipocytes, fibroblasts, vascular endothelial cells and a variety of immune cells (i.e. adipose tissue macrophages (ATMs)). Adipose tissue is derived from preadipocytes. Its main role is to store energy in the form of lipids, although it also cushions and insulates the body. Pre-adipocytes are thought to be undifferentiated fibroblasts that can be stimulated to form adipocytes. The pre-adipocytes originate from mesenchymal stem cells. Areolar connective tissue is composed of adipocytes. The term “lipoblast” is used to describe the precursor of the adult cell. Adipose tissue degeneration-related diseases, conditions or disorders include, but are not limited to, Obesity, Dercum's disease (DD), Multiple symmetric lipomatosis (MSL), Familial multiple lipomatosis (FML), Lipodystrophy, Lipedema, or Atherosclerosis.

[0036] Lung

[0037] The lung is the essential respiration organ in many air-breathing animals. In mammals the two lungs are located near the backbone on either side of the heart. Their principal function is to transport oxygen from the atmosphere into the bloodstream, and to release carbon dioxide from the bloodstream into the atmosphere. A large surface area is needed for this exchange of gases, which is accomplished by the mosaic of specialized cells that form millions of tiny, exceptionally thin-walled air sacs called alveoli. Lung cells include, but are not limited to, type I pneumocytes, type II pneumocytes, clara cells and goblet cells. Lung tissue degeneration-related diseases, conditions or disorders include, but are not limited to, Asthma, Chronic obstructive pulmonary disease (COPD), Chronic bronchitis, Emphysema, Cystic fibrosis, Pulmonary edema, Acute respiratory distress syndrome (ARDS), Pneumoconiosis, Interstitial lung disease (ILD), Sarcoidosis, Idiopathic pulmonary fibrosis, Pulmonary embolism (PE), Pulmonary hypertension, Pleural effusion, Pneumothorax, Mesothelioma, Granulomatosis with polyangiitis (GPA), Goodpasture syndrome (GPS), Pulmonary hyperplasia, Infant respiratory distress syndrome (IRDS), Chronic obstructive pulmonary disease (COPD), Silicosis, Sleep Apnea, Severe Acute Respiratory Syndrome (SARS), Pulmonary fibrosis, Primary ciliary dyskinesia (PCD), Pneumoconiosis (Black Lung Disease), Hypersensitivity Pneumonitis, Cryptogenic Organizing Pneumonia (Bronchiolitis Obliterans Organizing Pneumonia (BOOP)), Byssinosis, Bronchopulmonary Dysplasia, Bronchiolitis, Bronchiectasis, Asbestosis, Pertussis, Middle Eastern Respiratory Syndrome (MERS), Pneumonia, Tuberculosis, Bronchitis, Histoplasmosis, Coccidioidomycosis (Cocci), or Acute bronchitis.

[0038] The present invention thus provides cyclic compounds, compositions, microenvironments, functionalised bioactive carriers, medical devices, and kits comprising them, methods and processes for the design, preparation, manufacture and/or formulation of such cyclic compounds, compositions, functionalised bioactive carriers, medical devices and kits comprising them, and methods and uses thereof for regenerating or recoding mammalian tissues.

### BRIEF DESCRIPTION OF THE DRAWINGS

[0039] FIG. 1 is a representation of a relative area of focal adhesion (FA) contacts in human Bone Marrow Mesenchymal Stem Cell cultured with and without GFR-binding compounds as defined herein after 24 hours of incubation.

[0040] FIG. 2 is a diagram representing a commitment of human Bone Marrow Mesenchymal Stem Cells towards osteoblast-like cells after 62 hours of culture on titanium biomaterials covalently modified according to the invention using Runx2 and Osterix immunofluorescent stainings.

[0041] FIG. 3 is a representation of a fluorescence intensity of osteogenic GFR-binding compounds as defined herein mixed with type-I collagen or with apatite ceramics substrates. The images represent surfaces non-covalently coated with osteogenic peptides-FITC.

[0042] FIG. 4 is a representation of a fluorescence intensity of GFR-binding compounds-FITC coated on apatite ceramics after incubation in cell culture medium for the indicated times (up to 10 days).

[0043] FIG. 5 is a diagram representing a quantification of the proliferation of osteoblast precursors after 48 hours of cell culture on apatite ceramics and on collagen coated with osteogenic GFR-binding compounds as defined herein.

[0044] FIG. 6 is a representation of the commitment of hMSCs towards osteoblast-like cells after 48 hours of culture on collagen and on apatite ceramics coated with osteogenic GFR-binding compounds as defined herein using Runx2 and Osterix immunofluorescent stainings.

[0045] FIG. 7 is a representation of an immunofluorescent staining of F-actin (green) and Osteopontin (red) for hMSC showing their differentiation into osteoblast cells after 96 hours of culture on a type-I collagen scaffold non-covalently modified with a compound of the invention.

[0046] FIG. 8 is a representation of a Quantitative Real Time PCR analysis of the expression of Runx2 in cells cultured on native apatite ceramics and on apatite ceramics non-covalently modified with the different osteogenic GFR-binding compounds as defined herein, (P<0.005). (b) is the micrographs for Alkaline Phosphatase Activity.

[0047] FIG. 9 is (a) representation of a quantification of the relative Sox9 intensity on hMSCs cultured with and without GFR-binding compounds as defined herein. hMSCs committed towards chondrocyte differentiation as seen by positive Sox9 (Transcription factor) immunofluorescent staining. (b) is a a semi-quantitative RT-PCR analysis for the expression of the Aggrecan gene.

[0048] FIG. 10 is a representation of a distribution of the endothelial cell adherens junction's size. The results were obtained from immunofluorescence staining with an antibody against CD31 (PECAM1).

[0049] FIG. 11 is confocal images of endothelial cells cultured with and without GFR-binding compounds as defined herein. The fluorescence intensities corresponding to F-actin filaments (Phalloidin staining) was represented in green.

[0050] FIG. 12 is a representation of (a) a Phase-contrast Micrograph showing the progression of migrating cells after scratching and (b) a Mean epithelial cell velocity measured for cells cultured with and without GFR-binding compounds as defined herein.

[0051] FIG. 13 is (a) a diagram representing the results of a Quantitative Real Time PCR analysis for the expression of Sox2 for cells cultured with or without GFR-binding compounds as defined herein. (b) The total BMP-6 immunofluorescence intensity in the cell culture medium was quantified for Hair Follicle Stem Cells cultured for 96 h.

[0052] FIG. 14 is (a) a quantification of the cell area of hMSCs cultured with or without GFR-binding compounds as defined herein. The average cell area was estimated from approximately 25 cells from 2 different passages. (b) is a Quantitative Real Time PCR analysis for the expression of the COMP gene (Cartilage Oligomeric Matrix Protein, a tendon/ligament lineage gene).

[0053] FIG. 15 is a diagram representing the results of a Quantitative Real Time PCR analysis of the expression of the Growth Associated Protein 43 (GAP43) gene for cells cultured with and without GFR-binding compounds as defined herein.

[0054] FIG. 16 is diagram representing the amount of STRO-1 (a hMSC stemness marker) present in the cells expressed as an average fluorescence intensity, normalized by the number of cells.

### DETAILED DESCRIPTION

[0055] Cellular differentiation is the process by which a cell type becomes specialized, and involves a highly controlled switch from one gene expression pattern to another. In each specific lineage, cells progress through various stages of differentiation and maturation. In the case of bone lineage, osteoblast progenitors are derived from adult bone marrow mesenchymal stem cells, followed by osteoblast precursors, mature osteoblasts and osteocytes.

[0056] Mesenchymal stem cells or MSCs are multipotent stromal cells that can differentiate into a variety of cell types including osteoblasts (bone cells), chondrocytes (cartilage cells), neurons, endothelial cells and adipocytes (fat cells). Growth factors generally modulate MSC activity through non-covalent binding to specific receptors called growth factor receptors (GFRs). Growth factors (GF) bind to serine-threonine kinase receptors on the cell surface, triggering specific intracellular pathways that activate and influence gene transcription, having effects in cell proliferation and/or differentiation. There are three or more receptors (types I, II and III) for GF members but only types I and II are required for binding and signalling. After binding of signal molecule, receptors are activated which leads into induction of SMAD pathway. Type I receptors phosphorylate receptor-regulated Smads (R-Smads) which form a complex with common-partner Smad (Co-Smad). This complex is translocated into the nucleus and modulates gene transcription with other transcription factors required for chondrogenic differentiation.

[0057] Modulation of such an activity may typically be performed using recombinant growth factors. However, studies indicated that prior attempts using this technology, for instance, in the field of spinal fusion, may be harmful to the patient treated and lead in certain cases to the development of tumors and other serious side-effects. The real clinical advantage over previously employed technics not involving the use of recombinant growth factors may also be questioned.

[0058] Other attempts to induce tissue formation involve the use of synthetic peptides reproducing parts of the natural sequences of growth factors. For example, these synthetic peptides have been studied for their potential use in improving bone repair. However, these peptides generally often lack sufficient biological activity and suffer from poor in-vitro and/or in-vivo stability. Furthermore, the tissue-induction activity of conventional synthetic peptides is not rapid. For example, in-vitro osteogenic differentiation of mesenchymal stem cells cultured on biomaterials using such conventional peptides is generally observed after 3 weeks of cell culture.

[0059] The present invention thus provides embodiments for:
[0060] Modifying and/or enhancing and/or modulating and/or promoting and/or activating tissue regeneration in mammals, preferably humans;
[0061] Modifying and/or enhancing and/or modulating and/or promoting and/or activating bone, and/or cartilage, and/or vascular, and/or neuronal, and/or retinal, and/or organs such as kidneys or lungs, and/or ligament/tendon, and/or hair follicle, and/or skin, and/or blood, and/or adipose, tissue regeneration;
[0062] Modifying and/or enhancing and/or modulating and/or promoting and/or activating embryonic patterning;
[0063] Modifying and/or enhancing and/or modulating and/or promoting and/or activating cellular migration and wound healing;
[0064] Modifying and/or enhancing and/or modulating and/or promoting and/or activating the closure of any type of living tissues;
[0065] Modifying and/or enhancing and/or modulating and/or promoting and/or activating female fertility;
[0066] Preventing and/or suppressing or avoiding or reducing tissue degeneration in mammals, preferably humans;
[0067] Preventing and/or suppressing or avoiding or reducing bone, and/or cartilage, and/or vascular, and/or neuronal, and/or retinal, and/or organs such as kidneys or lungs, and/or ligament/tendon, and/or hair follicle, and/or skin, and/or blood, and/or adipose, tissue degeneration;
[0068] Protecting a subject from a tissue degeneration disease, disorder or condition;
[0069] Protecting a subject from osteoporosis;
[0070] Preventing and/or suppressing or avoiding or reducing cellular immobilization and wound formation and/or progression;
[0071] Preventing and/or suppressing or avoiding or reducing the misclosure of any type of living tissue;
[0072] Preventing and/or suppressing or avoiding or reducing female infertility;
[0073] Preventing and/or suppressing or avoiding or reducing hair-loss;
[0074] Preventing/treating alopecia areata, alopecia totalis, alopecia universalis, androgenic alopecia (male pattern baldness), telogen effluvium, anagen effluvium or chemotherapy-induced alopecia,
[0075] Modifying and/or enhancing and/or modulating and/or promoting and/or activating the osteogenicity, and/or the chondrogenecity, and/or the endothelization and vascularization ability, and/or hair growth ability, and/or the wound healing ability, and/or the skin repair ability, and/or the tissue defect closure ability, and/or the neuroregeneration ability, and/or the ligament/tendon tissue regeneration ability, and/or the female fertility ability, of a bioactive carrier such as a biomaterial which may be useful in the manufacturing of medical devices;
[0076] Modifying and/or enhancing and/or activating anti-aging/anti-wrinkle effects/properties in cosmetic products;
[0077] Modifying and/or enhancing and/or activating hair growth effects/properties in cosmetic products;
[0078] Modifying and/or enhancing and/or modulating and/or promoting and/or inducing and/or activating stem cells, preferably adult stem cells, more preferably mesenchymal stem cells, commitment and/or differentiation in a specific lineage of cells;
[0079] Modifying and/or enhancing and/or modulating and/or promoting and/or inducing and/or activating progenitor cells differentiation and/or maturation;
[0080] Obtaining/producing functional differentiated cells;
[0081] Obtaining/producing differentiated cells with modified and/or improved functionality and/or physiological activity.

### I. Definitions

[0082] Those skilled in the art will recognize, or be able to ascertain using no more than routine experimentation, many equivalents to the specific embodiments in accordance with the invention described herein. The scope of the present invention is not intended to be limited to the present description, but rather is as set forth in the appended claims.

[0083] In the claims, articles such as “a”, “an”, and “the” may mean one or more than one unless indicated to the contrary or otherwise evident from the context. Claims or descriptions that include “or” between one or more members of a group are considered satisfied if one, more than one, or all of the group members are present in, employed in, or otherwise relevant to a given product or process unless indicated to the contrary or otherwise evident from the context. The invention includes embodiments in which exactly one member of the group is present in, employed in, or otherwise relevant to a given product or process. The invention includes embodiments in which more than one, or all of the group members are present in, employed in, or otherwise relevant to a given product or process.

[0084] It is also noted that the term “comprising” is intended to be open and permits but does not require the inclusion of additional elements or steps. When the term “comprising” is used herein, the terms “consisting of”, “consisting essentially of”, “consisting substantially of” and “consisting exclusively of” are thus also encompassed and disclosed.

[0085] As used herein, the term “approximately” or “about,” as applied to one or more values of interest, refers to a value that is similar to a stated reference value. In certain embodiments, the term “approximately” or “about” refers to a range of values that fall within 25%, 20%, 19%, 18%, 17%, 16%, 15%, 14%, 13%, 12%, 11%, 10%, 9%, 8%, 7%, 6%, 5%, 4%, 3%, 2%, 1%, or less in either direction (greater than or less than) of the stated reference value unless otherwise indicated, self-evident or contradictory in context (e.g. except where such number would exceed 100% of a possible value).

[0086] As used herein and unless otherwise indicated or contradictory in context, the term “with” followed by a specific number of amino acids, when used to define a particular peptide, variant or analog thereof, such as in “a peptide with three amino acids”, means that such peptide, variant or analog thereof, contains exclusively the specific number of amino acids specified after this term.

[0087] As used herein and unless otherwise indicated or contradictory in context, the term “Ci-alkyl” is intended to specifically and individually disclose any branched or unbranched radical, moiety or functional group having “i” carbon atom(s).

[0088] The carbon atom content of the various hydrocarbon-containing moieties herein may be indicated by a prefix designating the minimum and maximum number of carbon atoms in the moiety. For example, in certain embodiments, (Ca-Cb)alkyl indicates an alkyl moiety of the integer “a” to the integer “b” carbon atoms, inclusive.

[0089] At various places in the present specification, substituents of compounds of the present disclosure may be disclosed in groups or in ranges. It is specifically intended that the present disclosure include each and every individual sub-combination of the members of such groups and ranges. For example, in certain embodiments, the term “C1-C5 alkyl” is an abbreviation for (and thus is specifically intended to individually disclose) C1-alkyl (i.e. methyl), C2-alkyl (i.e. ethyl), C3-alkyl (i.e. 1-propyl and 2-propyl), C4-alkyl (i.e. 1-butyl, sec-butyl, iso-butyl and tert-butyl), and C5-alkyl (i.e. 1-pentyl, 2-pentyl, 3-pentyl, 2-methyl-1-butyl, 3-methyl-1-butyl, 2-methyl-2-butyl, 3-methyl-2-butyl, 2,2-dimethyl-1-propyl and 1,1-dimethyl-1-propyl).

[0090] As used herein, unless indicated otherwise or contradictory in context, the terms “alkyl” and “(Ca-Cb)alkyl” refer to monovalent hydrocarbon radicals containing the requisite number of carbon atoms as described above, having straight or branched moieties or combinations thereof. As used herein, alkyl groups may be optionally substituted with between one to four substitutes. Non-limiting examples of alkyl groups include, e.g. methyl, ethyl, n-propyl, isopropyl, n-butyl, isobutyl, sec-butyl, t-butyl, etc. Of course, other alkyl groups will be readily apparent to those of skilled in the art given the benefit of the present disclosure.

[0091] Where ranges are given, endpoints are included. Furthermore, it is to be understood that unless otherwise indicated or otherwise evident from the context and understanding of one of ordinary skill in the art, values that are expressed as ranges can assume any specific value or sub-range within the stated ranges in different embodiments of the invention, to the tenth of the unit of the lower limit of the range, unless the context clearly dictates otherwise. For example, in certain embodiments, a disclosed 0-10 range would, for example, in certain embodiments, also specifically and individually disclose the following values and ranges: 0, 1, 2, 3, 4, 5, 6, 7, 8, 9, 10, 0.1, 0.2, 0.3, 0.4, 0.5, 0.6, 0.7, 0.8, 0.9, 1, 1.1, 1.2, 1.3, 1.4, 1.5, 1.6, 1.7, 1.8, 1.9, 2, 2.1, 2.2, 2.3, 2.4, 2.5, 2.6, 2.7, 2.8, 2.9, 3, 3.1, 3.2, 3.3, 3.4, 3.5, 3.6, 3.7, 3.8, 3.9, 4, 4.1, 4.2, 4.3, 4.4, 4.5, 4.6, 4.7, 4.8, 4.9, 5, 5.1, 5.2, 5.3, 5.4, 5.5, 5.6, 5.7, 5.8, 5.9, 6, 6.1, 6.2, 6.3, 6.4, 6.5, 6.6, 6.7, 6.8, 6.9, 7, 7.1, 7.2, 7.3, 7.4, 7.5, 7.6, 7.7, 7.8, 7.9, 8, 8.1, 8.2, 8.3, 8.4, 8.5, 8.6, 8.7, 8.8, 8.9, 9, 9.1, 9.2, 9.3, 9.4, 9.5, 9.6, 9.7, 9.8, 9.9, 10, 0-1, 0-2, 0-3, 0-4, 0-5, 0-6, 0-7, 0-8, 0-9, 1-2, 1-3, 1-4, 1-5, 1-6, 1-7, 1-8, 1-9, 2-3, 2-4, 2-5, 2-6, 2-7, 2-8, 2-9, 2-10, 3-4, 3-5, 3-6, 3-7, 3-8, 3-9, 3-10, 4-5, 4-6, 4-7, 4-8, 4-9, 4-10, 5-6, 5-7, 5-8, 5-9, 5-10, 6-7, 6-8, 6-9, 6-10, 7-8, 7-9, 7-10, 8-9, 8-10, 9-10, 0-0.1, 0-0.2, 0-0.3, 0-0.4, 0-0.5, 0-0.6, 0-0.7, 0-0.8, 0-0.9, 0-1.1, 0-1.2, etc.

[0092] As used herein and unless otherwise indicated or contradictory in context, the term “substantially” refers to the qualitative condition of exhibiting total or near-total extent or degree of a characteristic or property of interest. One of ordinary skill in the biological arts will understand that biological and chemical phenomena rarely, if ever, go to completion and/or proceed to completeness or achieve or avoid an absolute result. The term “substantially” is therefore used herein to capture the potential lack of completeness inherent in many biological and chemical phenomena.

[0093] In addition, it is to be understood that any particular embodiment of the present invention that falls within the prior art may be explicitly excluded from any one or more of the claims using the appropriate disclaimer(s) or proviso(s). Since such embodiments are deemed to be known to one of ordinary skill in the art, they may be excluded even if the exclusion is not set forth explicitly herein. Any particular embodiment of the compositions of the invention (e.g., any nucleic acid or protein encoded thereby; any method of production; any method of use; etc.) can be excluded from any one or more claims, for any reason, whether or not related to the existence of prior art.

[0094] All cited sources, for example, in certain embodiments, references, publications, databases, database entries, and art cited herein, are incorporated into this application by reference in their entirety, even if not expressly stated in the citation. In case of conflicting statements of a cited source and the instant application, the statement in the instant application shall control.

[0095] As the case may be, and unless otherwise indicated or contradictory in context, macromolecules molecular weights should be understood in the present description as being number averaged molecular weights.

[0096] The peptides mentioned in the present description may not follow the usual representation conventions. For instance, the N-terminal amino acid of a peptide sequence may be the first amino acid in the sequence or the last amino acid. Likewise, the C-terminal amino acid of a peptide sequence may be the first amino acid in the sequence or the last amino acid. For example, in the peptide sequence NAIS, “N” may be N-terminal or C-terminal, and “S” may be N-terminal or C-terminal.

[0097] In the present application, when reference is made to a certain peptide (e.g. a cyclic GFR-binding compound as provided herein) comprising one or more other peptide(s), said one or more other peptide(s) is(are) understood to be stably (in most cases, covalently) attached/bound to at least one part of said peptide. The attachment/binding may be located anywhere on the peptide unless indicated otherwise, contradictory in context or contradictory to general scientific rules. No specific attachment/binding location of said one or more other peptide(s) to said peptide shall be assumed unless specifically mentioned.

[0098] Peptide or polypeptide: As used herein, the term “peptide” or “polypeptide” are used interchangeably and refers to a polymer of less than or equal to 100 amino acids long, e.g., about 2, 3, 4, 5, 10, 15, 20, 25, 30, 35, 40, 45, 50, 55, 60, 65, 70, 75, 80, 85, 90, 95 or 100 amino acids long. The terms apply to amino acid polymers in which one or more amino acid residue is an artificial chemical mimetic of a corresponding naturally occurring amino acid, as well as to naturally occurring amino acid polymers, non-naturally occurring amino acid polymers, peptide analogs, peptide variants and peptide mimetics. Conventional techniques for synthesising peptides involve the activation of the carboxylic acid function of an amino acid or of a peptide, using a coupling agent. This activated acid is then contacted with an amino acid or a peptide in which the N-terminal amino acid is not protected, thus forming an amide bond also called peptide bond. Coupling reaction conditions together with coupling agents are well known in the art and described, for instance, in Greene, “Protective Groups in Organic Synthesis”, Wiley, New York, 2007 4th edition. In addition, suitable peptide synthesis routes are described, for instance, in Hojo H., Recent progress in the chemical synthesis of proteins, Curr Opin Struct Biol. 2014; 26C:16-23 and Saranya Chandrudu, et al., Chemical Methods for Peptide and Protein Production, Molecules, 2013, 18, 4373-4388, each of which is incorporated herein by reference in its entirety. There are two main strategies for peptide synthesis i.e. liquid-phase peptide synthesis and solid-phase peptide synthesis (SPPS) which is now most commonly used for peptide synthesis. Instead of C-terminal protection with a chemical group, the C-terminus of the first amino acid is coupled to an activated solid support, such as polystyrene or polyacrylamide. This type of approach has a two-fold function: the resin acts as the C-terminal protecting group and provides a rapid method to separate the growing peptide product from the different reaction mixtures during synthesis. As with many different biological manufacturing processes, peptide synthesizers have been developed for automation and high-throughput peptide production. SPPS allows the synthesis of natural peptides which are difficult to express in bacteria, the incorporation of unnatural amino acids, peptide/protein backbone modification, and the synthesis of D-proteins, which consist of D-amino acids. Very long peptide can be accessed by using native chemical ligation to couple two peptides together with quantitative yields.

[0099] Peptide analogs: As used herein, unless indicated otherwise or contradictory in context, the term “peptide analogs” refers to polypeptide variants which differ by one or more amino acid alterations, e.g., substitutions, additions or deletions of amino acid residues that still maintain one or more of the properties of the parent or starting peptide.

[0100] Peptide variants: As used herein, unless indicated otherwise or contradictory in context, the term “peptide variants” refers to a peptide which has a certain identity with a native or reference compound sequence. In one example, the peptide variant refers to any post-administration, application, injection modified peptide. Such post-administration, application, injection modifications include, but are not limited to, phosphorylation, acetylation, glutamylation, tyrosination, palmitoylation, glycosylation, myristoylation, palmitoylation, isoprenylation, glypiation, lipoylation, phosphopantetheinylation, acylation, alkylation, amidation, arginylation, polyglutamylation, polyglycylation, butyrylation, gamma-carboxylation, glycosylation, polysialylation, malonylation, hydroxylation, iodination, nucleotide addition, oxidation, adenylylation, propionylation, pyroglutamate formation, S-glutathionylation, S-nitrosylation, succinylation, sulfation, glycation, biotinylation, pegylation, ISGylation, SUMOylation, ubiquitination, Neddylation, Pupylation, citrullination, deamidation, eliminylation, carbamylation, and racemization.

[0101] Peptido-mimetic: As used herein, unless indicated otherwise or contradictory in context, the term “peptido-mimetic” or “peptidomimetic” refers to a synthetic chemical compound which comprises amino acids but not only and that is able to mimic the biological action of a peptide, often because the mimetic has a basic structure that mimics the basic structure of the peptide and/or has the salient biological properties of that peptide. In one particular example, a peptidomimetic is a hybrid molecule containing both, at least one peptide, and at least one of a polysaccharide, a polynucleotide or a linear or branched, saturated or unsaturated, hydrocarbon chain.

[0102] Linear peptide: As used herein, unless indicated otherwise or contradictory in context, the term “linear peptide” means a peptide in which the C-terminal and the N-terminal amino acid residues do not covalently interact with each other and none of the C-terminal or the N-terminal amino acid residues covalently interacts with another amino acid residue of the peptide chain.

[0103] cyclic peptide: As used herein, unless indicated otherwise or contradictory in context, the term “cyclic peptide” means peptide in which the C-terminal and N-terminal amino acid residues do covalently interact with each other or the C-terminal and/or the N-terminal amino acid residues covalently interact with at least one other amino acid residue of the peptide chain so as to form a ring-like structure.

[0104] Amino acid: As used herein, unless indicated otherwise or contradictory in context, the term “amino acid” refers to naturally occurring and non-naturally occurring amino acids including amino acid analogs. Naturally occurring amino acids are those encoded by the genetic code, as well as those amino acids that are later modified, e.g., hydroxyproline, [gamma]-carboxyglutamate, and O-phosphoserine. Naturally encoded amino acids are the 20 common amino acids glycine (Gly, G), alanine (Ala, A), valine (Val, V), leucine (Leu, L), isoleucine (Ile, I), serine (Ser, S), threonine (Thr, T), phenylalanine (Phe, F), tyrosine (Tyr, Y), tryptophane (Trp, W), cysteine (Cys, C), methionine (Met, M), proline (Pro, P), aspartic acid (Asp, D), asparagine (Asn, N), glutamine (Gln, Q), glutamic acid (Glu, E), histidine (His, H), arginine (Arg, R) et lysine (Lys, K) and pyrrolysine and selenocysteine. Non-naturally occurring amino acids include, but are not limited to, the dextrogyre (D) isomers of the above-cited naturally-occurring amino acids. Amino acid analogs refers to compounds that have the same basic chemical structure as a naturally occurring amino acid i.e., an [alpha] carbon that is bound to a hydrogen, a carboxyl group, an amino group, and an R group (i.e. side chain), and which may be used in replacement thereof without substantially affecting the overall function of the peptide to which it belongs. Amino acid analogs (or non-naturally occurring amino acids) that may be suitable for implementing embodiments of the present invention include, but are not limited to, amino acids comprising a photoactivatable cross-linker, spin-labeled amino acids, fluorescent amino acids, metal binding amino acids, metal-containing amino acids, radioactive amino acids, amino acids with novel functional groups, amino acids that covalently or noncovalently interact with other molecules, photocaged and/or photoisomerizable amino acids, amino acids comprising biotin or a biotin analogue, glycosylated amino acids such as a sugar substituted serine, other carbohydrate modified amino acids, keto-containing amino acids, amino acids comprising polyethylene glycol or polyether, heavy atom substituted amino acids, chemically cleavable and/or photocleavable amino acids, amino acids with an elongated side chains as compared to natural amino acids, including but not limited to, polyethers or long chain hydrocarbons, including but not limited to, greater than about 5 or greater than about 10 carbons, carbon-linked sugar-containing amino acids, redox-active amino acids, amino thioacid containing amino acids, and amino acids comprising one or more toxic moiety. The term “AA^{I}” (AA roman numeral one) may be used in the description and refers to an amino acid which may be any amino acid as defined above in particular any naturally occurring and non-naturally occurring amino acids.

[0105] Amino acid side chain: As used herein, unless indicated otherwise or contradictory in context, the term “amino acid side chain” means the functional group of an amino acid that differentiates it from other amino acids. All amino acid structures have a carboxyl group, an amine group and a specific side chain.

[0106] AA^{II} (AA roman numeral two): As used herein, unless indicated otherwise or contradictory in context, the terms “polar amino acid” or “AA^{II}” means amino acids having a polar, non-charged group-containing side chain. Polar amino acids are protonated at physiological pH (about 7). Examples of polar amino acids include, but are not limited to, Cys (C), Asn (N), Gln (Q), Ser (S), Thr (T), or Tyr (Y).

[0107] AA^{III} (AA roman numeral three): As used herein, unless indicated otherwise or contradictory in context, the terms “acidic amino acid” or “AA^{III}” means amino acids having an acidic group-containing side chain. Acidic amino acid deprotonated forms predominate at physiological pH (about 7). Examples of acidic amino acids include, but are not limited to, Asn (N) and Glu (E).

[0108] AA^{IV} (AA roman numeral four): As used herein, unless indicated otherwise or contradictory in context, the terms “aliphatic amino acid” or “AA^{IV}” means amino acids having an aliphatic side chain. Examples of aliphatic amino acids include, but are not limited to, Ala (A), Leu (L), Ile (I), Gly (G), Val (V) and any analogs and derivatives thereof.

[0109] AA^{V} (AA roman numeral five): As used herein, unless indicated otherwise or contradictory in context, the terms “apolar amino acid” or “AA^{V}” means amino acids having an apolar side chain. Examples of apolar amino acids include, but are not limited to, Ala (A), Phe (F), Gly (G), Ile (I), Leu (L), Met (M), Pro (P), Val (V) or Trp (W).

[0110] AA^{VI} (AA roman numeral six): As used herein, unless indicated otherwise or contradictory in context, the term “aromatic amino acid” or “AA^{V}” means amino acids having an aromatic group-containing side chain. Examples of aromatic amino acids include, but are not limited to, Trp (W), Tyr (Y) or Phe (F).

[0111] AA^{VII} (AA roman numeral seven): As used herein, unless indicated otherwise or contradictory in context, the term “basic amino acid” or “AA^{VII}”, means amino acids having a basic group-containing side chain.

[0112] Basic amino acid protonated forms predominate at physiological pH (about 7). Examples of basic amino acids include, but are not limited to, Arg (R), His (H), or Lys (K).

[0113] AA^{VIII} (AA roman numeral eight): As used herein, unless indicated otherwise or contradictory in context, the term “AA^{VIII}” means Leu (L) or Ile (I) and any analogs and derivatives thereof.

[0114] AA^{IX} (AA roman numeral nine): As used herein, unless indicated otherwise or contradictory in context, the term “charged amino acid” or “AA^{IX}” means amino acids having either an acidic group-containing side chain or an basic group-containing side chain. Charged amino acid charged forms predominate at physiological pH (about 7). Examples of charged amino acids include, but are not limited to, Asn (N), Glu (E), His (H), Lys (K) or Arg (R).

[0115] AAⁿ: As used herein, unless indicated otherwise or contradictory in context, the term “AAⁿ”, in which n is a positive integer arbitrarily chosen to identify a specific position within the primary sequence of a peptide. For instance, AA¹³ means the amino acid of position 13. The terms “amino acid” and “AA” are interchangeably used in the present description.

[0116] N-terminal: As used herein, unless indicated otherwise or contradictory in context, the term “N-terminal” means the amine (—NH₂) function/group/moiety located at one (terminal) end of a protein or polypeptide. This functional group is the only amine group which is not engage in n amide peptide bond.

[0117] C-terminal: As used herein, unless indicated otherwise or contradictory in context, the term “C-terminal” means the carboxylate (—CO₂H) function/group/moiety located at one (terminal) end of a protein or polypeptide. This functional group is the only carboxylic acid group which is not engage in n amide peptide bond.

[0118] Naturally-occurring peptide: As used herein, unless indicated otherwise or contradictory in context, the terms “naturally-occurring peptide” or “natural peptide” means a peptide which may be found in nature without human direct intervention (except for its extraction and/or isolation).

[0119] Synthetic peptide: As used herein, unless indicated otherwise or contradictory in context, the terms “synthetic peptide” or “non-natural peptide” means a peptide which may not be found in nature without human direct intervention (except for its extraction and/or isolation). For example, in certain embodiments, a synthetic peptide may have the amino acid sequence of a natural peptide except for at least one amino acid deletion or substitution relative to the natural sequence. In the case of a substitution, an amino acid from the natural sequence is replaced by another, different, naturally-occurring or non-naturally occurring amino acid. For example, in certain embodiments, a synthetic peptide may not possess a post-translational modification of the natural peptide such as the attachment of an acetate group, a phosphate group, a lipid, a carbohydrate, or the formation of a disulfide bridge.

[0120] Covalent interaction: As used herein, unless indicated otherwise or contradictory in context, the term “interact covalently”, “covalent interaction” or “covalent bond” are interchangeably used and means a chemical bond or interaction that involves the sharing of electron pairs between atoms. Examples of such interactions are a-bonding and 7c-bonding.

[0121] Non-covalent interaction: As used herein, unless indicated otherwise or contradictory in context, the term “interact non-covalently”, “non-covalent interaction” or “non-covalent bond” are interchangeably used and means a chemical bond or interaction that does not involve the sharing of electron pairs between atoms but rather involves more dispersed variations of electromagnetic interactions between molecules or within a molecule. Non-covalent interactions can be generally classified into four categories, electrostatic interactions, 7c-interactions, van der Waals forces, and hydrophobic interactions.

[0122] Electrophile: As used herein, unless indicated otherwise or contradictory in context, the term “electrophile” means an organic molecule attracted to electrons that participates in a chemical reaction by accepting an electron pair in order to bond to a nucleophile. Most electrophiles are positively charged, have an atom that carries a partial positive charge, or have an atom that does not have an octet of electrons.

[0123] Nucleophile: As used herein, unless indicated otherwise or contradictory in context, the term “nucleophile” means an organic molecule that donates an electron pair to an electrophile to form a chemical bond in relation to a reaction. All molecules or ions with a free pair of electrons or at least one pi bond can act as nucleophiles.

[0124] Polysaccharide: As used herein, unless indicated otherwise or contradictory in context, the term “polysaccharide” means polymeric carbohydrate molecules composed of long chains of monosaccharide units bound together by glycosidic linkages and which upon hydrolysis provide monosaccharides or oligosaccharides. They range in structure from linear to highly branched polymers.

[0125] Polynucleotide: As used herein, the term “polynucleotide” or “nucleic acid”, which are used interchangeably, refers to the phosphate ester polymeric form of ribonucleosides (“RNA molecules”) or deoxyribonucleosides (“DNA molecules”), or any phosphoester analogs thereof, such as phosphorothioates and thioesters, in either single stranded form, or a double-stranded helix. The term “nucleic acid” includes double-stranded DNA round, inter alia, in linear (e.g., restriction fragments) or circular DNA molecules. In particular, nucleic acids as used herein refer to nucleic acids such as RNAs encoding for agonist of growth factor receptors as defined herein.

[0126] Nucleoside: As used herein, the term “nucleoside” refers to a compound containing a sugar molecule (e.g., a pentose or ribose) or derivative thereof in combination with an organic base (e.g., a purine or pyrimidine) or a derivative thereof (also referred to herein as “nucleobase”).

[0127] Nucleotide: As used herein, the term “nucleotide” refers to a nucleoside including a phosphate group.

[0128] Dendrimer: As used herein, unless indicated otherwise or contradictory in context, the term “dendrimer” means any repetitively branched molecules. Examples of dendrimers are phosphorous dendrimers, polylysine dendrimers, polypropylenimine dendrimers and PAMAM dendrimers, such as the ones described, for instance, in Scientific World Journal. 2013; 2013:732340; Curr Opin Chem Biol. 1998; 2(6):733-42; J Pept Sci. 1999; 5(5):203-20; and J Pept Sci. 2008; 14(1):2-43, which may be used for implementing embodiments of the present invention, each of which being herein incorporated by reference in its entirety.

[0129] Synthetic molecule: As used herein, unless indicated otherwise or contradictory in context, the term “synthetic molecule” means a molecule which may not be found in nature without human direct intervention (except for its extraction and/or isolation).

[0130] Synthetic polymers: As used herein, unless indicated otherwise or contradictory in context, the term “synthetic polymer” refers to a macromolecule or polymer which may not be found in nature without human direct intervention (except for its extraction and/or isolation).

[0131] Biocompatible: As used herein, unless indicated otherwise or contradictory in context, the term “biocompatible” means compatible with living cells, tissues, organs or systems posing little to no risk of injury, toxicity or rejection by the immune system.

[0132] Biologically active: As used herein, unless indicated otherwise or contradictory in context, the term “biologically active” refers to a characteristic of any substance that has activity in a biological system and/or organism. For instance, a substance that, when administered to an organism, has a biological effect on that organism, is considered to be biologically active. In particular examples, a compound, substance or pharmaceutical composition of the present disclosure may be considered biologically active even if a portion of the compound, substance or pharmaceutical composition is biologically active or mimics an activity considered biologically relevant.

[0133] Stem cells: As used herein, unless indicated otherwise or contradictory in context, the term “stem cell” refers to the term as it is generally understood in the art. For example, in certain embodiments, stem cells, regardless of their source, are cells that are capable of dividing and renewing themselves for long periods, are at least to a degree unspecialized (undifferentiated), and can give rise to (differentiate into) specialized cell types (i.e., they are progenitor or precursor cells for a variety of different, specialized cell types).

[0134] Mesenchymal stem cells: As used herein, unless indicated otherwise or contradictory in context, the term “mesenchymal stem cells” generally means multipotent adult stromal cells that can differentiate into a variety of cell types, such as osteoblasts, chondrocytes, and adipocytes.

[0135] Stem cell-like: As used herein, unless indicated otherwise or contradictory in context, the term “Stem cell-like” refers to a cell which is not a stem cell by its origin but functions as a stem cell and presents similar characteristics such as, for example, the expression of stemness markers like Stro-1 and/or is multipotent thus has the ability to differentiate into various cell types.

[0136] Progenitor cells: As used herein, unless indicated otherwise or contradictory in context, the term “progenitor cells” generally means a biological cell that, like any stem cell, has a tendency to differentiate into a specific type of cell, but is already more specific than a stem cell and is pushed to differentiate into its “target” cell. Stem cells can generally replicate indefinitely, whereas progenitor cells can divide only a limited number of times.

[0137] Adult stem cells: As used herein, unless indicated otherwise or contradictory in context, the term “adult stem cells” means undifferentiated cells, found throughout the body after development, that multiply by cell division to replenish dying cells and regenerate damaged tissues. Also known as somatic stem cells, they can be found in juvenile as well as adult animals and human bodies.

[0138] Differentiation: As used herein, unless indicated otherwise or contradictory in context, the term “differentiation” refers to the process by which a less specialized cell becomes a more specialized cell type and involves a switch from one gene expression pattern to another.

[0139] Differentiated cells: As used herein, unless indicated otherwise or contradictory in context, the term “differentiated cells” generally means any cell of a specific lineage at the exception of cells containing stem cell specific markers.

[0140] Non-terminally differentiated: As used herein, unless indicated otherwise or contradictory in context, the term “non-terminally differentiated”, when used in relation to a cell, refers to a differentiated cell as defined herein which has not reached its final state of differentiation. For example, in certain embodiments, in the Osteoblast cell lineage, a non-terminally differentiated cell is any differentiated cell of the lineage at the exception of an osteocyte.

[0141] Terminally differentiated: As used herein, unless indicated otherwise or contradictory in context, the term “terminally differentiated”, when used in relation to a cell, refers to a differentiated cell as defined herein which has reached its final state of differentiation. For example, in certain embodiments, in the Osteoblast cell lineage, a terminally differentiated cell is an osteocyte.

[0142] Methods for obtaining stem cells: Methods for obtaining such stem cells and providing initial culture conditions, such as a liquid culture or semi-solid culture medium, are known in the art. The cells are initially expanded in vivo or in vitro, by contacting the source of the stem cells with a suitable reagent that expands or enriches such cells in the tissue source or in culture. Preferably, adult stem cells are isolated from a tissue source and then expanded or enriched in vitro by exposure to a suitable agent. Cells are obtained from an individual by any suitable method for obtaining a cell sample from an animal, including, but not limited, to, collection of bone marrow collection of a bodily fluid (e.g., blood), collection of umbilical cord blood, tissue punch, and tissue dissection, including particularly, but not limited to, any biopsies of skin, intestine, cornea, spinal cord, brain tissue, scalp, stomach, breast, lung (e.g., including lavage and bronchioschopy), fine needle aspirates of the bone marrow, amniotic fluid, placenta and yolk sac.

[0143] Osteogenesis: As used herein, unless indicated otherwise or contradictory in context, the term “osteogenesis” refers to the process by which bone is produced. An entity, molecule, compound, association, combination or composition may be said to be “osteogenic” when it has an effect on the development, growth, or repair of bone. This process involves the participation of stem cells.

[0144] Chondrogenesis: As used herein, unless indicated otherwise or contradictory in context, the term “chondrogenesis” refers to the process by which cartilage is produced. An entity, molecule, compound, association, combination or composition may be said to be “chondrogenic” when it has an effect on the development, growth, or repair of cartilage. This process involves the participation of stem cells.

[0145] Endothelialisation: As used herein, unless indicated otherwise or contradictory in context, the term “endothelialization” or “re-endothelialization” refers to the process that maintains or restores normal vascular homeostasis and regulates neointimal hyperplasia. In native tissue, the endothelium maintains vessel integrity with dynamic mechanisms that prevent thrombosis and intimal hyperplasia. The endothelial progenitor cells are an important component of the response to vascular injury, having the potential to accelerate vascular repair through rapid re-endothelialization. For example, drug-eluting stents are generally implanted during angioplasty into patients suffering from atherosclerosis and resulting in stenosis or restenosis. In drug-eluting stents, the drug is typically coated onto a metal alloy framework and is mainly employed to inhibit neointimal growth (due to proliferation of smooth muscle cells) which would cause restenosis. Because much of the neointimal hyperplasia seems to be caused by inflammation, immunosuppressive and antiproliferative drugs are conventionally used. Drugs such as sirolimus and paclitaxel are currently used. Re-endothelialization in drug-eluting stents is generally delayed which can increase the risk for late stent thrombosis which thus may also require the administration of antiplatelet drugs such as Clopidogrel and aspirin.

[0146] Vascularization/angiogenesis: As used herein, unless indicated otherwise or contradictory in context, the term “vascularization/angiogenesis” refers to a physiological process through which new blood vessels are produced from pre-existing vessels. This process involves the participation of stem cells.

[0147] Wound healing: As used herein, unless indicated otherwise or contradictory in context, the term “wound healing” refers to a process whereby the skin (or another organ-tissue) repairs itself after injury. This process involves the participation of stem cells.

[0148] Skin repair: As used herein, unless indicated otherwise or contradictory in context, the term “skin repair” means the reparation of the dermis through the participation of stem cells. These active cells produce collagenous fibers and ground substance. Blood vessels soon grow into the dermis, restoring circulation.

[0149] Neuron-regeneration: As used herein, unless indicated otherwise or contradictory in context, the term “neuron-regeneration” or “neuroregeneration” refers to the regrowth or repair of nervous tissues, cells or cell products involving the participation of stem cells. Such mechanisms may include generation of new neurons, glia, axons, myelin, or synapses.

[0150] Tissue closure: As used herein, unless indicated otherwise or contradictory in context, the term “tissue closure” refers to the closure of all tissue layers damaged e.g. in an injury or during surgery. For instance, during bone repair surgery, the different layers of tissues incised in order for the surgeon to reach the damaged bone part and repair it would all need to be closed for the overall healing process to occur.

[0151] Cell lineage: As used herein, unless indicated otherwise or contradictory in context, the term “cell lineage” refers to the developmental history of a particular cell from its primary state in the fertilized egg or embryo through to its fully differentiated state. The different steps and phases involved in the development of a cell produces many intermediate cells which may be referred to as progenitor or precursor cells in the present application and form an integral part of the cell lineage.

[0152] Osteoblast cell lineage: As used herein, unless indicated otherwise or contradictory in context, the term “osteoblast cell lineage” refers to bone cells at any stage of their development and thus include, but are not limited to, mesenchymal stem cells, osteoblasts, osteocytes or any precursors thereof.

[0153] Chondrocytic cell lineage: As used herein, unless indicated otherwise or contradictory in context, the term “chondrocytic cell lineage” refers to cartilage cells at any stage of their development and thus include, but are not limited to, mesenchymal stem cells,

[0154] Muscle cell lineage: As used herein, unless indicated otherwise or contradictory in context, the term “muscle cell lineage” refers to muscle cells at any stage of their development and thus include, but are not limited to, mesenchymal stem cells, myoblasts, myocytes or any precursors thereof.

[0155] Vascular cell lineage: As used herein, unless indicated otherwise or contradictory in context, the term “vascular cell lineage” refers to vascular cells at any stage of their development and thus include, but are not limited to, mesenchymal stem cells, angioblast, pericytes and endothelial cells or any precursors thereof.

[0156] Neuronal cell lineage: As used herein, unless indicated otherwise or contradictory in context, the term “neuron lineage” refers to brain cells at any stage of their development and thus include, but are not limited to, neural stem cells, neuroblast, neurocyte and neuroglial cells or any precursors thereof.

[0157] Retinal cell lineage: As used herein, unless indicated otherwise or contradictory in context, the term “retinal cell lineage” refers to eye retina cells at any stage of their development and thus include, but are not limited to, photoreceptor, bipolar cells, rod and cone cells or any precursors thereof.

[0158] Renal cell lineage: As used herein, unless indicated otherwise or contradictory in context, the term “renal cell lineage” refers to renal cells at any stage of their development and thus include, but are not limited to, mesenchymal stem cells, podocytes, or any precursors thereof.

[0159] Ligament and tendon cell lineage: As used herein, unless indicated otherwise or contradictory in context, the term “ligament and tendon cell lineage” or “UT cell lineage” refers to bone or cartilage cells at any stage of their development and thus include, but are not limited to, mesenchymal stem cells, fibroblasts, fibrocytes, or any precursors thereof.

[0160] Fibroblast lineage: As used herein, unless indicated otherwise or contradictory in context, the term “fibroblast lineage” refers to skin cells at any stage of their development and thus include, but are not limited to, mesenchymal stem cells, fibroblasts, keratinocytes, Merkel cells, melanocytes, Langerhans cells, and any precursor cells thereof.

[0161] Reproduction system lineage: As used herein, unless indicated otherwise or contradictory in context, the term “reproduction system lineage” refers to Sertoli cells, Leydig cell and Germ cell at any stage of their development, in particular, mesenchymal stem cells.

[0162] Blood cell lineages (myeloid lineage and lymphoid lineage): As used herein, unless indicated otherwise or contradictory in context, the term “blood cell lineages” refers to blood cells at any stage of their development from the myeloid or from the lymphoid lineage, and thus include, but are not limited to, hematopoietic stem cells (HSC), myeloid progenitors, lymphoid progenitors, mast cells, myeloblasts, monocytes, macrophages, neutrophils, basophils, eosinophils, erythrocytes, megakaryocytes, thrombocytes, dendritic cells, small lymphocytes, T-lymphocytes (T-cells), B-lymphocytes (B-cells), natural killer (NK)-cells, and any precursor cells thereof.

[0163] Adipocyte lineage: As used herein, unless indicated otherwise or contradictory in context, the term “adipocyte cell lineage” refers to adipocyte cells at any stage of their development and thus include, but are not limited to, mesenchymal stem cells, areolar connective cells, adipocytes, pre-adipocytes/lipoblasts, and any precursor cells thereof.

[0164] Lung cell Lineages: As used herein, unless indicated otherwise or contradictory in context, the term “lung cell Lineage” refers to lung cells at any stage of their development and thus include, but are not limited to, epithelial cells, erythrocytes, alveolar cells and any precursor cells thereof.

[0165] Ratio: As used herein, unless indicated otherwise or contradictory in context, the term “ratio”, when used in relation to cyclic GFR-binding compound with respect to the bioactive carrier in the pharmaceutical association or composition disclosed herein, refers to the (molar, weight or part as specified) ratio between the quantity of cyclic GFR-binding compound and the quantity of bioactive carrier. The ratio may be a molar ratio, a weight ratio or a part ratio and will be specified as needed on a case by case basis. Quantity units may conventionally be mole, millimole, gram, milligram or parts. For example, in certain embodiments, it is convenient to express the relative quantity between cyclic GFR-binding compounds and bioactive carriers using densities. It shall be understood that this ratio may be varied according to the cell type to be treated.

[0166] Density: As used herein, unless indicated otherwise or contradictory in context, the term “density”, when used in relation to cyclic GFR-binding compound with respect to the bioactive carrier in the pharmaceutical composition disclosed herein, refers to the quantity of cyclic GFR-binding compounds, expressed in e.g. mole, millimole, gram, or milligram, with respect to one standardised surface unit e.g. squared millimetre (mm²), squared micrometre (μm²), or squared nanometre (nm²)). For example, in certain embodiments, the ratio between a cyclic GFR-binding compound and a bioactive carrier in the pharmaceutical association or composition disclosed herein may be expressed in pmol per mm² or pmol/mm².

[0167] Recoding: As used herein, unless indicated otherwise or contradictory in context, the term “recoding”, when used in relation to a cell (in particular a mesenchymal stem cell or progenitor stem cell), refers to the action of contacting (in-vitro, ex-vivo or in-vivo) a stem cell to be treated with a suitable extracellular micro-environment (e.g. containing a peptide, variant or analog thereof, peptidomimetic, a biomaterial, a medical device, or a medical or cosmetic composition as defined herein) thus providing appropriate extracellular signals so that the cell may undergo efficient differentiation into a more specialised cell type.

[0168] Recoding therapy: As used herein, unless indicated otherwise or contradictory in context, the term “recoding therapy” refers to a therapy that promotes efficient stem cell differentiation in an aim to regenerate mammalian tissues.

[0169] Extracellular micro-environment: As used herein, unless indicated otherwise or contradictory in context, the term “extracellular micro-environment” refers to the environment surrounding (in functional proximity with) a specific stem cell which is characterized by biophysical, mechanical and biochemical properties specific for each tissue and is able to regulate cell behavior. Modification of the extracellular micro-environment of a specific mesenchymal stem cell using, for instance, a peptide, variant or analog thereof, peptidomimetic, a biomaterial, a medical device, or a medical or cosmetic composition as defined herein, allows for the efficient differentiation of this cell into a more specialised cell type.

[0170] Physiologically functional cell: As used herein, unless indicated otherwise or contradictory in context, the term “physiologically functional cell” refers to a cell which is able to perform normally all of the cell functions associated with a particular cell type and necessary for the normal physiology of a cell. These functions include all of the intracellular molecular mechanisms but also all of the activities necessary for a normal communication between the cell and its microenvironment. One method which may be used to verify if a cell is physiologically functional is the grafting of the cell, after the introduction of fluorescent markers, in other mammalian model organisms such as mouse models. The cell is grafted in the tissue corresponding to its cell type. The cell characteristics and normal functions are monitored after a period of time with various methods such as in vivo microscopy or histological staining. The term “functional” when used in relation to a molecule, compound or substance refers to a biological molecule in a form in which it exhibits a property and/or activity by which it is characterized.

[0171] Shorter period of time: As used herein, unless indicated otherwise or contradictory in context, the term “shorter period of time”, when used in relation to differentiation or recoding duration, means substantially shorter to provide a substantial benefit for the treated patient in comparison with existing treatments. In certain embodiments, a shorter period of time includes at least 1.5-fold, at least 2-fold, at least 2.5-fold, at least 3-fold, at least 3.5-fold, at least 4-fold, at least 4.5-fold, at least 5-fold, at least 6-fold, at least 7-fold, at least 8-fold, at least 9-fold or at least 10-fold reduction with respect to an existing treatment.

[0172] Exogenous: As used herein, unless indicated otherwise or contradictory in context, the term “exogenous” refers to a substance coming from outside a living system such as a cell, an organ, or an individual organism. For example, in certain embodiments, exogenous factors in medicine include pathogens and therapeutics. DNA introduced into a cell via transfection or viral infection may be considered as an exogenous factor. Carcinogens are also commonly referred to as exogenous factors.

[0173] Endogenous: As used herein, unless indicated otherwise or contradictory in context, the term “endogenous” refers to substances that originate from within an organism, tissue, or cell.

[0174] Intracellular: As used herein, unless indicated otherwise or contradictory in context, the term “intracellular” generally means “inside the cell”. In vertebrates, such as animals, the cell membrane is the barrier between the inside of the cell and the outside of the cell (the extracellular milieu). Thus, treatments and therapies in which at least one substance, compound, pharmaceutical association, combination or composition penetrates the cell wall of a cell to be treated in order to produce/deliver its (effective) biological effect are considered as intracellular treatments and therapies.

[0175] Extracellular: As used herein, unless indicated otherwise or contradictory in context, the term “extracellular” means “outside the cell”. In vertebrates, such as animals, the cell membrane is the barrier between the inside of the cell (the intracellular milieu) and the outside of the cell. Thus, treatments and therapies in which no substance, compound, pharmaceutical association, combination or composition requires penetration of the cell membrane in order to produce/deliver its (effective) biological effect (e.g. by interacting with trans-membrane receptors) are considered as extracellular treatments and therapies. In other words, a therapy using a plurality of substances in order to provide the desired biological effect wherein one or more of these substances require the entry into the intracellular compartment to provide (or deliver) its biological effect is not considered as an extracellular therapy in the sense of the present disclosure.

[0176] In vitro: As used herein, unless indicated otherwise or contradictory in context, the term “in vitro” refers to events that occur in an artificial environment, e.g., in a test tube or reaction vessel, in cell culture, in a Petri dish, etc., rather than within an organism (e.g., animal, plant, or microbe).

[0177] In vivo: As used herein, unless indicated otherwise or contradictory in context, the term “in vivo” refers to events that occur within an organism (e.g., animal, plant, or microbe or cell or tissue thereof).

[0178] Ex vivo: As used herein, unless indicated otherwise or contradictory in context, the term “ex vivo” refers to events that occur in an external environment on tissues sourced from an organism (e.g., animal, plant, or microbe) in an attempt to replicate natural living conditions outside such an organism.

[0179] Patient/subject: As used herein, unless indicated otherwise or contradictory in context, the term “patient” or “subject”, which are used interchangeably, refers to any organism to which a composition in accordance with the invention may be administered, e.g., for experimental, diagnostic, prophylactic, and/or therapeutic purposes. Typical subjects include animals (e.g., mammals such as mice, rats, rabbits, non-human primates, and humans) and/or plants. As used herein, patients/subjects include those individuals who may seek or be in need of treatment, requires treatment, is receiving treatment, will receive treatment, or a subject who is under care by a trained professional for a particular disease or condition.

[0180] Purified: As used herein, unless indicated otherwise or contradictory in context, the term “purify,” “purified,” “purification” means to make substantially pure or clear from unwanted components, material defilement, admixture or imperfection.

[0181] Targeted Cells: As used herein, unless indicated otherwise or contradictory in context, the term “targeted cells” refers to any one or more cells of interest. The cells may be found in vitro, in vivo, in situ or in the tissue or organ of an organism. The organism may be an animal, preferably a mammal, more preferably a human and most preferably a patient.

[0182] Molecule length: As used herein, unless indicated otherwise or contradictory in context, the term molecule or peptide “length” or “size” means the longest 2D or 3D distance which may possibly be measured within the molecule. For cyclic molecules, “length” or “size” means the longest measurable distance across the cyclic structure. Throughout the present disclosure, when a molecule size or length is given (in general using the nanometre, nm, unit), the following procedures were used to calculate them:
[0183] The so-called «2D» procedure: a 2D chemical structure was drawn in e.g. the Chem Draw® Software. Then, size measurement was carried out via the available ChemDraw length measurement tools. The length value given herein corresponds to the longest 2D length of the molecule using the default settings 2D bond sizes and angles of the software.
[0184] Alternatively, the so-called “3D” procedure may be followed:
[0185] (1) Drawing of the chemical structure of the molecule using suitable softwares (such as ChemDraw).
[0186] (2) Creating a 3D structure model of the molecule hereby drawn using SCWRL (Protein Sci. 2003; 12(9):2001-14) or MODELLER (Current Protocols in Bioinformatics. 15:5.6:5.6.1-5.6.30), each of which is hereby incorporated by reference in its entirety.
[0187] (3) Incubating the obtained 3D structure model in a box simulation containing water for few milliseconds using AMBER (J. Computat. Chem. 2005; 26, 1668-1688), which is hereby incorporated by reference in its entirety.
[0188] (4) Measuring the size of the molecule hereby obtained using softwares such as Pymol® using available Pymol length measurement tools (DeLano Scientific LLC, http://www.pymol.org).

### II. Growth Factor Receptor-Binding Compounds

[0189] In one aspect, the present disclosure provides for cyclic growth factor receptor-binding compounds having the ability to induce stem cell differentiation and promote tissue regeneration.

[0190] As used herein, the term “cyclic growth factor receptor-binding compound”, “cyclic GFR-binding compound” or “cyclic GFRBC” refers to an exogenous or endogenous cyclic compound, molecule or substance having an (binding) affinity for a growth factor receptor as defined herein, and optionally comprising the ability to associate or combine with a bioactive carrier as defined herein.

[0191] There are many ways to test, measure and present the binding affinity of a given substance for a given receptor, but for the purpose of the present disclosure, and for the avoidance of any doubts, the (binding) affinity values of a given cyclic GFR-binding compound to a given GFR are provided using the method of fluorescence anisotropy. In this method, a cyclic GFR-binding compound is fluorescently labelled using technics well established in the art. Binding of the resulting labelled compound to a growth factor receptor results in a fluctuation of fluorescence anisotropy which is used to construct an affinity binding curve from which the cyclic GFR-binding compound binding affinity value is derived. Using this technique, binding affinity values are given in the form of dissociation constants Kd. In certain embodiments, cyclic GFR-binding compounds of the present disclosure have Kd values as measured by fluorescence anisotropy of more than 1 (one) picomolar (pM). In certain embodiments, cyclic GFR-binding compounds of the present disclosure have Kd values as measured by fluorescence anisotropy of more than 1 (one) nanomolar (nM). In certain embodiments, cyclic GFR-binding compounds of the present disclosure have Kd values as measured by fluorescence anisotropy of more than 10 (ten) nanomolar (nM). In certain embodiments, cyclic GFR-binding compounds of the present disclosure have Kd values as measured by fluorescence anisotropy of more than 100 (one hundred) nanomolar (nM). In certain embodiments, cyclic GFR-binding compounds of the present disclosure have Kd values as measured by fluorescence anisotropy of more than 1 (one) micromolar (μM). In certain embodiments, cyclic GFR-binding compounds of the present disclosure have Kd values as measured by fluorescence anisotropy of more than 10 (ten) micromolar (μM). In certain embodiments, cyclic GFR-binding compounds of the present disclosure have Kd values as measured by fluorescence anisotropy of more than 100 (one hundred) micromolar (μM).

[0192] A cyclic GFR-binding compound is said to possess the ability to associate or combine with a bioactive carrier if it comprises a functional chemical element, function or group allowing for the covalent or non-covalent assembly of the cyclic GFR-binding compound and the bioactive carrier. Such a functional chemical element, function or group, also referred to as a bioactive carrier-affinity-contaning group or bioactive carrier-high-affinity-containing group, include, but is not limited to, a thiol-containing compound, a cysteine-containing compound, a cysteine, or a GTPGP or a WWFWG peptide fragment.

[0193] Growth Factor Receptor:

[0194] As used herein, unless indicated otherwise or contradictory in context, the term “growth factor receptor” or “GFR” is a receptor which binds to growth factors which are naturally occurring substances capable of stimulating, for instance, cellular growth, proliferation, healing, and cellular differentiation. Suitable as growth factor receptors for implementing embodiments of the present invention include epidermal growth factor receptors (EGFR), fibroblast growth factor receptors (FGFR), vascular endothelial growth factor receptors (VEGFR), nerve growth factor receptors (NGFR), Insulin receptor family, Trk receptor family, Eph receptor family, AXL receptor family, LTK receptor family, TIE receptor family, ROR receptor family, DDR receptor family, RET receptor family, KLG receptor family, RYK receptor family, MuSK receptor family, hepatocyte growth factor receptors (HGFR), somatomedin or insulin-like growth factor receptors (SGFR), platelet-derived growth factor receptors (PDGFR), transforming growth factor beta (TGF-β) superfamily proteins such as AMH, ARTN, BMP10, BMP15, BMP2, BMP3, BMP4, BMP5, BMP6, BMP7, BMP8A, BMP8B, GDF1, GDF10, GDF11, GDF15, GDF2, GDF3, GDF3A, GDF5, GDF6, GDF7, GDF8, GDF9, GDNF, INHA, INHBA, INHBB, INHBC, INHBE, LEFTY1, LEFTY2, MSTN, NODAL, NRTN, PSPN, TGFB1, TGFB2 and TGFB3, and any combination thereof.

[0195] Growth Factor:

[0196] As used herein, unless indicated otherwise or contradictory in context, the term “growth factor” refers to any substance(s) having the ability to bind to a growth factor receptor and produce (a) biological effect(s) or reaction(s), such as promoting the growth of tissues, by activating such a growth factor receptor. Exemplary growth factors include, but are not limited to, platelet-derived growth factor (PDGF), platelet-derived angiogenesis factor (PDAF), vascular endotheial growth factor (VEGF), platelet-derived epidermal growth factor (PDEGF), transforming growth factor beta (TGF-β), transforming growth factor A (TGF-A), epidermal growth factor (EGF), fibroblast growth factor (FGF), acidic fibroblast growth factor (FGF-A), basic fibroblast growth factor (FGF-B), insulin-like growth factors 1 and 2 (IGF-I and IGF-2), keratinocyte growth factor (KGF), tumor necrosis factor (TNF), fibroblast growth factor (FGF) and interleukin-1 (IL-I), Keratinocyte Growth Factor-2 (KGF-2), and combinations thereof.

[0197] Activation of Growth Factor Receptors:

[0198] As used herein, unless indicated otherwise or contradictory in context, the term “activating” or “activation of”, when used in relation to a growth factor receptor, refers to the phosphorylation of the tyrosine kinase domain of such a growth factor receptor.

[0199] In one aspect, the present disclosure provides a cyclic GFR-binding compound having mesenchymal stem cell and progenitor cell commitment and/or differentiation and/or maturation capacities resulting in tissue regeneration.

[0200] In one example, said cyclic GFR-binding compound has a molecular weight of less than 5,000 Daltons. In one particular example, said cyclic GFR-binding compound has a molecular weight of less than 4,000 Daltons. In one particular example, said cyclic GFR-binding compound has a molecular weight comprised between 1,000 and 5,000 Daltons. In one particular example, said cyclic GFR-binding compound has a molecular weight comprised between 1,000 and 4,000 Daltons.

[0201] In one example, said cyclic GFR-binding compound has a molecular weight of less than 7,000 Daltons. In one example, said cyclic GFR-binding compound has a molecular weight of less than 6,000 Daltons. In one example, said cyclic GFR-binding compound has a molecular weight of less than 5,000 Daltons. In one particular example, said cyclic GFR-binding compound has a molecular weight comprised between 1,000 and 7,000 Daltons. In one particular example, said cyclic GFR-binding compound has a molecular weight comprised between 1,000 and 6,000 Daltons. In one particular example, said cyclic GFR-binding compound has a molecular weight comprised between 2,000 and 7,000 Daltons. In one particular example, said cyclic GFR-binding compound has a molecular weight comprised between 2,000 and 6,000 Daltons.

[0202] In one particular example, the growth factor receptor involved in the interaction with said cyclic GFR-binding compound is an epidermal growth factor receptor. In one particular example, the growth factor receptor involved in the interaction with said cyclic GFR-binding compound is a fibroblast growth factor receptor. In one particular example, the growth factor receptor involved in the interaction with said cyclic GFR-binding compound is a vascular endothelial growth factor receptor. In one particular example, the growth factor receptor involved in the interaction with said cyclic GFR-binding compound is a nerve growth factor receptor. In one particular example, the growth factor receptor involved in the interaction with said cyclic GFR-binding compound is a hepatocyte growth factor receptor. In one particular example, the growth factor receptor involved in the interaction with said cyclic GFR-binding compound is a somatomedin or insulin-like growth factor receptor. In one particular example, the growth factor receptor involved in the interaction with said cyclic GFR-binding compound is a platelet-derived growth factor receptor. In one particular example, the growth factor receptor involved in the interaction with said cyclic GFR-binding compound is a protein from the transforming growth factor beta (TGF-β) superfamily.

[0203] In one particular example, the growth factor receptor(s) involved in the interaction with said cyclic GFR-binding compound is (are) preferably selected from epidermal growth factor receptors, fibroblast growth factor receptors, vascular endothelial growth factor receptors, nerve growth factor receptors, hepatocyte growth factor receptors, somatomedin or insulin-like growth factor receptors, platelet-derived growth factor receptors, and transforming growth factor beta (TGF-β) superfamily proteins.

[0204] In one particular example, said cyclic GFR-binding compound is a peptide, or a variant or analog thereof, having growth factor receptor-binding capability or capabilities, with (exclusively consisting of, or constituted of) between 10-60 amino acids, in particular between 10-55 amino acids, more particularly between 15-60 amino acids, and even more particularly between 15-55 amino acids, or between 10-35 amino acids, in particular between 15-35 amino acids, more particularly between 10-30 amino acids, and even more particularly between 15-30 amino acids.

[0205] In one particular example, said cyclic GFR-binding compound is a cyclic peptidomimetic as defined herein, having growth factor receptor-binding capability or capabilities, comprising (consecutively or non consecutively) between 10-60 amino acids, in particular between 10-55 amino acids, more particularly between 15-60 amino acids, and even more particularly between 15-55 amino acids, or between 10-35 amino acids, in particular between 15-35 amino acids, more particularly between 10-30 amino acids, and even more particularly between 15-30 amino acids; wherein said cyclic GFR-binding compound has a molecular weight comprised between 1,000 and 7,000 Daltons (in particular, between 1,000 and 6,000 Da).

[0206] In one particular example, said cyclic GFR-binding compound is a cyclic peptidomimetic as defined herein, having growth factor receptor-binding capability or capabilities, comprising (consecutively or non consecutively) between 10-60 amino acids, in particular between 10-55 amino acids, more particularly between 15-60 amino acids, and even more particularly between 15-55 amino acids, or between 10-35 amino acids, in particular between 15-35 amino acids, more particularly between 10-30 amino acids, and even more particularly between 15-30 amino acids; and containing at least one peptide portion or fragment with between 5-20 amino acids (in particular containing one peptide portion or fragment with between 5-20 amino acids); wherein said cyclic GFR-binding compound has a molecular weight comprised between 1,000 and 7,000 Daltons (in particular, between 1,000 and 6,000 Da).

[0207] In one aspect, the present disclosure provides a cyclic GFR-binding compound, wherein said cyclic GFR-binding compound is a cyclic peptide, a variant or analog thereof, or a cyclic peptidomimetic as defined herein, having growth factor receptor-binding capability or capabilities, having a molecular weight of less than 7,000 Da, in particular of between 1,000 and 7,000 Da, more particularly of between 1,000 and 6,000 Da.

[0208] In one aspect, the present disclosure provides a cyclic GFR-binding compound, wherein said cyclic GFR-binding compound is a cyclic peptide, a variant or analog thereof, or a cyclic peptidomimetic as defined herein, having growth factor receptor-binding capability or capabilities, with between 10-60 (in particular between 15-60, more particularly between 10-55, and even more particularly between 15-55) amino acids or with between 10-35 (in particular between 15-35, more particularly between 10-30, and even more particularly between 15-30) amino acids, comprising a peptide with four amino acids (PEP1).

[0209] In one aspect, the present disclosure provides a cyclic GFR-binding compound, wherein said cyclic GFR-binding compound is a cyclic peptide, a variant or analog thereof, or a cyclic peptidomimetic as defined herein, with between 10-60 (in particular between 15-60, more particularly between 10-55, and even more particularly between 15-55) amino acids or with between 10-35 (in particular between 15-35, more particularly between 10-30, and even more particularly between 15-30) amino acids, comprising a peptide with eight amino acids (PEP12).

[0210] In one aspect, the present disclosure provides a cyclic GFR-binding compound, wherein said cyclic GFR-binding compound is a cyclic peptide, a variant or analog thereof, or a cyclic peptidomimetic as defined herein, with between 10-60 (in particular between 15-60, more particularly between 10-55, and even more particularly between 15-55) amino acids or with between 10-35 (in particular between 15-35, more particularly between 10-30, and even more particularly between 15-30) amino acids, comprising a peptide with four amino acids (PEP1); wherein said cyclic GFR-binding compound further comprises a peptide with three amino acids (PEP3).

[0211] In one aspect, the present disclosure provides a cyclic GFR-binding compound, wherein said cyclic GFR-binding compound is a cyclic peptide, a variant or analog thereof, or a cyclic peptidomimetic as defined herein, with between 10-60 (in particular between 15-60, more particularly between 10-55, and even more particularly between 15-55) amino acids or with between 10-35 (in particular between 15-35, more particularly between 10-30, and even more particularly between 15-30) amino acids, comprising a peptide with eight amino acids (PEP12); wherein said cyclic GFR-binding compound further comprises a peptide with three amino acids (PEP3).

[0212] In one aspect, the present disclosure provides a cyclic GFR-binding compound, wherein said cyclic GFR-binding compound is a cyclic peptide, a variant or analog thereof, or a cyclic peptidomimetic as defined herein, with between 10-60 (in particular between 15-60, more particularly between 10-55, and even more particularly between 15-55) amino acids or with between 10-35 (in particular between 15-35, more particularly between 10-30, and even more particularly between 15-30) amino acids, comprising a peptide with four amino acids (PEP1); wherein said cyclic GFR-binding compound further comprises a peptide with five amino acids (PEP5).

[0213] In one aspect, the present disclosure provides a cyclic GFR-binding compound, wherein said cyclic GFR-binding compound is a cyclic peptide, a variant or analog thereof, or a cyclic peptidomimetic as defined herein, with between 10-60 (in particular between 15-60, more particularly between 10-55, and even more particularly between 15-55) amino acids or with between 10-35 (in particular between 15-35, more particularly between 10-30, and even more particularly between 15-30) amino acids, comprising a peptide with eight amino acids (PEP12); wherein said cyclic GFR-binding compound further comprises a peptide with five amino acids (PEP5).

[0214] In one aspect, the present disclosure provides a cyclic GFR-binding compound, wherein said cyclic GFR-binding compound is a cyclic peptide, a variant or analog thereof, or a cyclic peptidomimetic as defined herein, with between 10-60 (in particular between 15-60, more particularly between 10-55, and even more particularly between 15-55) amino acids or with between 10-35 (in particular between 15-35, more particularly between 10-30, and even more particularly between 15-30) amino acids, comprising a peptide with four amino acids (PEP1); wherein said cyclic GFR-binding compound further comprises a peptide with between six and twelve amino acids (PEP9).

[0215] In one aspect, the present disclosure provides a cyclic GFR-binding compound, wherein said cyclic GFR-binding compound is a cyclic peptide, a variant or analog thereof, or a cyclic peptidomimetic as defined herein, with between 10-60 (in particular between 15-60, more particularly between 10-55, and even more particularly between 15-55) amino acids or with between 10-35 (in particular between 15-35, more particularly between 10-30, and even more particularly between 15-30) amino acids, comprising a peptide with eight amino acids (PEP12); wherein said cyclic GFR-binding compound further comprises a peptide with between six and twelve amino acids (PEP9).

[0216] In one aspect, the present disclosure provides a cyclic GFR-binding compound, wherein said cyclic GFR-binding compound is a cyclic peptide, a variant or analog thereof, or a cyclic peptidomimetic as defined herein, with between 10-60 (in particular between 15-60, more particularly between 10-55, and even more particularly between 15-55) amino acids or with between 10-35 (in particular between 15-35, more particularly between 10-30, and even more particularly between 15-30) amino acids, comprising a peptide with four amino acids (PEP1); wherein said cyclic GFR-binding compound further comprises a peptide with three amino acids (PEP3), and an amino acid or a peptide with between two and seven amino acids (PEP7).

[0217] In one aspect, the present disclosure provides a cyclic GFR-binding compound, wherein said cyclic GFR-binding compound is a cyclic peptide, a variant or analog thereof, or a cyclic peptidomimetic as defined herein, with between 10-60 (in particular between 15-60, more particularly between 10-55, and even more particularly between 15-55) amino acids or with between 10-35 (in particular between 15-35, more particularly between 10-30, and even more particularly between 15-30) amino acids, comprising a peptide with four amino acids (PEP12); wherein said cyclic GFR-binding compound further comprises a peptide with three amino acids (PEP3), and an amino acid or a peptide with between two and seven amino acids (PEP7).

[0218] In one aspect, the present disclosure provides a cyclic GFR-binding compound, wherein said cyclic GFR-binding compound is a cyclic peptide, a variant or analog thereof, or a cyclic peptidomimetic as defined herein, with between 10-60 (in particular between 15-60, more particularly between 10-55, and even more particularly between 15-55) amino acids or with between 10-35 (in particular between 15-35, more particularly between 10-30, and even more particularly between 15-30) amino acids, comprising a peptide with four amino acids (PEP1); wherein said cyclic GFR-binding compound further comprises a peptide with five amino acids (PEP5), and an amino acid or a peptide with between two and seven amino acids (PEP7).

[0219] In one aspect, the present disclosure provides a cyclic GFR-binding compound, wherein said cyclic GFR-binding compound is a cyclic peptide, a variant or analog thereof, or a cyclic peptidomimetic as defined herein, with between 10-60 (in particular between 15-60, more particularly between 10-55, and even more particularly between 15-55) amino acids or with between 10-35 (in particular between 15-35, more particularly between 10-30, and even more particularly between 15-30) amino acids, comprising a peptide with four amino acids (PEP12); wherein said cyclic GFR-binding compound further comprises a peptide with five amino acids (PEP5), and an amino acid or a peptide with between two and seven amino acids (PEP7).

[0220] In one aspect, the present disclosure provides a cyclic GFR-binding compound, wherein said cyclic GFR-binding compound is a cyclic peptide, a variant or analog thereof, or a cyclic peptidomimetic as defined herein, with between 10-60 (in particular between 15-60, more particularly between 10-55, and even more particularly between 15-55) amino acids or with between 10-35 (in particular between 15-35, more particularly between 10-30, and even more particularly between 15-30) amino acids, comprising a peptide, a variant or analog thereof, or a peptidomimetic having the following general formula (Ia) (hereinafter may also be referred to as compound (Ia) or peptide (Ia)):

PEP(A)-LINKER (Ia)

[0221] wherein one end of LINKER interacts covalently with one end of PEP(A); wherein PEP(A) comprises PEP1 or PEP12; wherein LINKER is a linear or branched organic divalent radical, moiety or compound having a molecular weight (Mw) comprised between 450 and 4,500 Daltons, in particular comprised between about 600 and about 4,500 Da, more particularly between about 600 and about 4,000 Da, and even more particularly between about 600 and about 3,500 Da.

[0222] In one aspect, the present disclosure provides a cyclic GFR-binding compound, wherein said cyclic GFR-binding compound is a cyclic peptide, a variant or analog thereof, or a cyclic peptidomimetic as defined herein, with between 10-60 (in particular between 15-60, more particularly between 10-55, and even more particularly between 15-55) amino acids or with between 10-35 (in particular between 15-35, more particularly between 10-30, and even more particularly between 15-30) amino acids, comprising a peptide, a variant or analog thereof, or a peptidomimetic having the following general formula (Ib) (hereinafter may also be referred to as compound (Ib) or peptide (Ib)):

LINKER-PEP(A)-LINKER (Ib)

[0223] wherein one end of a first LINKER interacts covalently with one end of PEP(A); wherein one end of a second LINKER interacts covalently with another end of PEP(A); wherein another end of a first LINKER interacts covalently with another end of a second LINKER; wherein PEP(A) comprises PEP1 or PEP12; wherein LINKER are independently a linear or branched organic divalent radical, moiety or compound having a molecular weight (Mw) comprised between 450 and 4,500 Daltons, in particular comprised between about 600 and about 4,500 Da, more particularly between about 600 and about 4,000 Da, and even more particularly between about 600 and about 3,500 Da.

[0224] In the present description, the molecular weight of LINKER refer to the calculated molecular weight prior to being connected to/reacted with any of the elements it is configured to connect to or react with e.g. PEP(A), or any other groups defined herein.

[0225] In one aspect, the present disclosure provides a cyclic GFR-binding compound comprising compounds (Ia) or (Ib), wherein PEP(A) further comprises PEP3.

[0226] In one aspect, the present disclosure provides a cyclic GFR-binding compound comprising compounds (Ia) or (Ib), wherein PEP(A) further comprises PEP5.

[0227] In one aspect, the present disclosure provides a cyclic GFR-binding compound comprising compounds (Ia) or (Ib), wherein PEP(A) further comprises PEP9.

[0228] In one aspect, the present disclosure provides a cyclic GFR-binding compound comprising compounds (Ia) or (Ib), wherein PEP(A) further comprises PEP3 and PEP7.

[0229] In one aspect, the present disclosure provides a cyclic GFR-binding compound comprising compounds (Ia) or (Ib), wherein PEP(A) further comprises PEP5 and PEP7.

[0230] In one aspect, the present disclosure provides a cyclic GFR-binding compound, wherein said cyclic GFR-binding compound is a cyclic peptide, a variant or analog thereof, or a cyclic peptidomimetic as defined herein, with between 10-60 (in particular between 15-60, more particularly between 10-55, and even more particularly between 15-55) amino acids or with between 10-35 (in particular between 15-35, more particularly between 10-30, and even more particularly between 15-30) amino acids, comprising a peptide, a variant or analog thereof, or a peptidomimetic having the following general formula (IIa) (hereinafter may also be referred to as compound (IIa) or peptide (IIa)):

PEP(C)-PEP12-LINKER (IIa)

[0231] wherein LINKER is a linear or branched organic divalent radical, moiety or compound having a molecular weight (Mw) comprised between 450 and 4,500 Daltons, in particular comprised between about 600 and about 4,500 Da, more particularly between about 600 and about 4,000 Da, and even more particularly between about 600 and about 3,500 Da; wherein PEP12 is a peptide with 8 amino acids of formula PEP1-AA¹⁷-PEP11 as defined herein; wherein PEP2 is a peptide with five amino acids as already defined herein; wherein one end of PEP(C) interacts covalently with PEP12 via one end of PEP1; wherein one end of LINKER interacts covalently with one end of PEP12 via one end of PEP11; wherein PEP(C) is a peptide with at least 5 amino acids, in particular a peptide with between 5 and 12 amino acids.

[0232] In one aspect, the present disclosure provides a cyclic GFR-binding compound, wherein said cyclic GFR-binding compound is a cyclic peptide, a variant or analog thereof, or a cyclic peptidomimetic as defined herein, with between 10-60 (in particular between 15-60, more particularly between 10-55, and even more particularly between 15-55) amino acids or with between 10-35 (in particular between 15-35, more particularly between 10-30, and even more particularly between 15-30) amino acids, comprising a peptide, a variant or analog thereof, or a peptidomimetic having the following general formula (IIb) (hereinafter may also be referred to as compound (IIb) or peptide (IIb)):

LINKER-PEP(C)-PEP12-LINKER (IIb)

[0233] wherein LINKER are independently a linear or branched organic divalent radical, moiety or compound having a molecular weight (Mw) comprised between 450 and 4,500 Daltons, in particular comprised between about 600 and about 4,500 Da, more particularly between about 600 and about 4,000 Da, and even more particularly between about 600 and about 3,500 Da; wherein PEP12 is a peptide with 8 amino acids of formula PEP1-AA¹⁷-PEP11 as defined herein; wherein PEP2 is a peptide with five amino acids as already defined herein; wherein one end of PEP(C) interacts covalently with PEP12 via one end of PEP1; wherein one end of a first LINKER interacts covalently with one end of PEP12 via one end of PEP11; wherein one end of a second LINKER interacts covalently with another end of PEP(C); wherein another end of a first LINKER interacts covalently with another end of a second LINKER; wherein PEP(C) is a peptide with at least 5 amino acids, in particular a peptide with between 5 and 12 amino acids.

[0234] In one aspect, the present disclosure provides a cyclic GFR-binding compound comprising compound (IIa) or (IIb), wherein PEP(C) comprises PEP3.

[0235] In one aspect, the present disclosure provides a cyclic GFR-binding compound comprising compound (IIa) or (IIb), wherein PEP(C) comprises PEP5. In one particular example, PEP(C) is PEP5.

[0236] In one aspect, the present disclosure provides a cyclic GFR-binding compound comprising compound (IIa) or (IIb), wherein PEP(C) comprises PEP9. In one particular example, PEP(C) is PEP9.

[0237] In one aspect, the present disclosure provides a cyclic GFR-binding compound comprising compound (IIa) or (IIb), wherein PEP(C) comprises PEP3 and PEP7.

[0238] In one aspect, the present disclosure provides a cyclic GFR-binding compound comprising compound (IIa) or (IIb), wherein PEP(C) comprises PEP5 and PEP7.

[0239] In one aspect, the present disclosure provides a cyclic GFR-binding compound comprising compound (IIa) or (IIb), wherein PEP(C) is PEP5 or PEP9.

[0240] In one aspect, the present disclosure provides a cyclic GFR-binding compound, wherein said cyclic GFR-binding compound is a cyclic peptide, a variant or analog thereof, or a cyclic peptidomimetic as defined herein, with between 10-60 (in particular between 15-60, more particularly between 10-55, and even more particularly between 15-55) amino acids or with between 10-35 (in particular between 15-35, more particularly between 10-30, and even more particularly between 15-30) amino acids, comprising a peptide, a variant or analog thereof, or a peptidomimetic having the following general formula (IIIa) (hereinafter may also be referred to as compound (IIIa) or peptide (IIIa)):

PEP7-PEP5-PEP12-LINKER (IIIa)

[0241] wherein LINKER is a linear or branched organic divalent radical, moiety or compound having a molecular weight (Mw) comprised between 450 and 4,500 Daltons, in particular comprised between about 600 and about 4,500 Da, more particularly between about 600 and about 4,000 Da, and even more particularly between about 600 and about 3,500 Da; wherein PEP12 is a peptide with 8 amino acids of formula PEP1-AA¹⁷-PEP11 as defined herein; wherein PEP5 is a peptide with five amino acids as already defined herein; wherein PEP7 an amino acid or a peptide with between two and seven amino acids as already defined herein; wherein one end of LINKER interacts covalently with one end of PEP12 via AA²⁰; wherein one end of PEP5 interacts covalently with another end of PEP12 via AA¹²; wherein another end of PEP5 interacts covalently with one end of PEP7 via AA⁸.

[0242] In one aspect, the present disclosure provides a cyclic GFR-binding compound, wherein said cyclic GFR-binding compound is a cyclic peptide, a variant or analog thereof, or a cyclic peptidomimetic as defined herein, with between 10-60 (in particular between 15-60, more particularly between 10-55, and even more particularly between 15-55) amino acids or with between 10-35 (in particular between 15-35, more particularly between 10-30, and even more particularly between 15-30) amino acids, comprising a peptide, a variant or analog thereof, or a peptidomimetic having the following general formula (IIIb) (hereinafter may also be referred to as compound (IIIb) or peptide (IIIb)):

LINKER-PEP7-PEP5-PEP12-LINKER (IIIb)

[0243] wherein LINKER are independently a linear or branched organic divalent radical, moiety or compound having a molecular weight (Mw) comprised between 450 and 4,500 Daltons, in particular comprised between about 600 and about 4,500 Da, more particularly between about 600 and about 4,000 Da, and even more particularly between about 600 and about 3,500 Da; wherein PEP12 is a peptide with 8 amino acids of formula PEP1-AA¹⁷-PEP11 as defined herein; wherein PEP5 is a peptide with five amino acids as already defined herein; wherein PEP7 an amino acid or a peptide with between two and seven amino acids as already defined herein; wherein one end of PEP5 interacts covalently with another end of PEP12 via AA¹²; wherein another end of PEP5 interacts covalently with one end of PEP7 via AA⁸; wherein one end of a first LINKER interacts covalently with one end of PEP12 via AA²⁰; wherein one end of a second LINKER interacts covalently with another end of PEP7; wherein another end of a first LINKER interacts covalently with another end of a second LINKER.

[0244] In one aspect, the present disclosure provides a cyclic GFR-binding compound, wherein said cyclic GFR-binding compound is a cyclic peptide, a variant or analog thereof, or a cyclic peptidomimetic as defined herein, with between 10-60 (in particular between 15-60, more particularly between 10-55, and even more particularly between 15-55) amino acids or with between 10-35 (in particular between 15-35, more particularly between 10-30, and even more particularly between 15-30) amino acids, comprising a peptide, a variant or analog thereof, or a peptidomimetic having the following general formula (IVa) (hereinafter may also be referred to as compound (IVa) or peptide (IVa)):

AA¹-AA²-AA³-AA⁴-AA⁵-AA⁶-AA⁷-AA⁸-AA⁹-AA¹⁰-AA¹¹-AA¹²-AA¹³-AA¹⁴-AA¹⁵-AA¹⁶-AA¹⁷-AA¹⁸-AA¹⁹-AA²⁰-LINKER (IVa)

[0245] wherein LINKER is a linear or branched organic divalent radical, moiety or compound having a molecular weight (Mw) comprised between 450 and 4,500 Daltons, in particular comprised between about 600 and about 4,500 Da, more particularly between about 600 and about 4,000 Da, and even more particularly between about 600 and about 3,500 Da; wherein AA¹-AA²-AA³-AA⁴-AA⁵-AA⁶-AA⁷ is PEP7 as defined herein; wherein AA¹³-AA¹⁴-AA¹⁵-AA¹⁶-AA¹⁷-AA¹⁸-AA¹⁹-AA²⁰ is PEP12 as defined herein; wherein AA⁸-AA⁹-AA¹⁰ is PEP3 as defined herein; wherein AA¹¹ and AA¹² are as defined herein; wherein one end of LINKER interacts covalently with AA²⁰; wherein AA¹ may be an N-terminal amino acid or a C-terminal amino acid; wherein AA²⁰ may be an N-terminal amino acid or a C-terminal amino acid.

[0246] In one aspect, the present disclosure provides a cyclic GFR-binding compound, wherein said cyclic GFR-binding compound is a cyclic peptide, a variant or analog thereof, or a cyclic peptidomimetic as defined herein, with between 10-60 (in particular between 15-60, more particularly between 10-55, and even more particularly between 15-55) amino acids or with between 10-35 (in particular between 15-35, more particularly between 10-30, and even more particularly between 15-30) amino acids, comprising a peptide, a variant or analog thereof, or a peptidomimetic having the following general formula (IVb) (hereinafter may also be referred to as compound (IVb) or peptide (IVb)):

LINKER-AA¹-AA²-AA³-AA⁴-AA⁵-AA⁵-AA⁷-AA⁸-AA⁹-AA¹⁰-AA¹¹-AA¹²-AA¹³-AA¹⁴-AA¹⁵-AA¹⁶-AA¹⁷-AA¹⁸-AA¹⁹-AA²⁰-LINKER (IVb)

[0247] wherein LINKER are independently a linear or branched organic divalent radical, moiety or compound having a molecular weight (Mw) comprised between 450 and 4,500 Daltons, in particular comprised between about 600 and about 4,500 Da, more particularly between about 600 and about 4,000 Da, and even more particularly between about 600 and about 3,500 Da; wherein AA¹-AA²-AA³-AA⁴-AA⁵-AA⁶-AA⁷ is PEP7 as defined herein; wherein AA¹³-AA¹⁴-AA¹⁵-AA¹⁶-AA¹⁷-AA¹⁸-AA¹⁹-AA²⁰ is PEP12 as defined herein; wherein AA⁸-AA⁹-AA¹⁰ is PEP3 as defined herein; wherein AA¹¹ and AA¹² are as defined herein; wherein one end of a first LINKER interacts covalently with AA²⁰; wherein one end of a second LINKER interacts covalently with AA¹; wherein another end of a first LINKER interacts covalently with another end of a second LINKER; wherein one end of the first LINKER may be an N-terminal amino acid or a C-terminal amino acid.

[0248] In one aspect, the present disclosure provides a cyclic GFR-binding compound, wherein said cyclic GFR-binding compound is a cyclic peptide, a variant or analog thereof, or a cyclic peptidomimetic as defined herein, with between 10-60 (in particular between 10-55, more particularly between 15-60, and even more particularly between 15-55) amino acids, or between 10-35 (in particular between 10-30, more particularly between 15-35, and even more particularly between 15-30) amino acids, comprising two LINKERs.

[0249] In one aspect, the present disclosure provides a cyclic GFR-binding compound, wherein said cyclic GFR-binding compound is a cyclic peptide, a variant or analog thereof, or a cyclic peptidomimetic as defined herein, with between 10-60 (in particular between 15-60, more particularly between 10-55, and even more particularly between 15-55) amino acids or with between 10-35 (in particular between 15-35, more particularly between 10-30, and even more particularly between 15-30) amino acids, having any one of the following schematic general formulae (V) to (XVIII) (hereinafter may also be referred to as compounds (V) to (XVIII) or peptides (V) to (XVIII)):

[chemical structure]

[chemical structure]

[0250] wherein LINKER is a linear or branched organic divalent radical, moiety or compound having a molecular weight (Mw) comprised between 450 and 4,500 Daltons, in particular comprised between about 600 and about 4,500 Da, more particularly between about 600 and about 4,000 Da, and even more particularly between about 600 and about 3,500 Da; wherein PEP12 is a peptide with 8 amino acids of formula PEP1-AA¹⁷-PEP11 as defined herein; wherein PEP5 is a peptide with five amino acids as already defined herein; wherein PEP7 an amino acid or a peptide with between two and seven amino acids as already defined herein; wherein PEP9 is a peptide with between six and twelve amino acids; wherein curved lines represents covalent bonds between LINKER and PEP1 to PEP12. Curved lines' lengths may not be representative of the actual relative distance between the LINKERs and PEP1 to PEP12.

[0251] In one aspect, the present disclosure provides a cyclic GFR-binding compound, wherein said cyclic GFR-binding compound is a cyclic peptide, a variant or analog thereof, or a cyclic peptidomimetic as defined herein, with between 10-60 (in particular between 15-60, more particularly between 10-55, and even more particularly between 15-55) amino acids or with between 10-35 (in particular between 15-35, more particularly between 10-30, and even more particularly between 15-30) amino acids, having any one of the following schematic general formulae (XIX) to (XXI) (hereinafter may also be referred to as compounds (XIX) to (XXI) or peptides (XIX) to (XXI)):

[chemical structure]

[0252] wherein LINKER is a linear or branched organic divalent radical, moiety or compound having a molecular weight (Mw) comprised between 450 and 4,500 Daltons, in particular comprised between about 600 and about 4,500 Da, more particularly between about 600 and about 4,000 Da, and even more particularly between about 600 and about 3,500 Da; wherein AA¹³-AA¹⁴-AA¹⁵-AA¹⁶-AA¹⁷-AA¹⁸-AA¹⁹-AA²⁰ is PEP12 as defined herein; wherein AA⁸-AA⁹-AA¹⁰ is PEP3 as defined herein; wherein AA¹¹ and AA¹² are as defined herein; wherein one end of LINKER interacts covalently with AA¹⁶ or AA²⁰; wherein another end of LINKER interacts covalently with AA⁸ or AA¹³; wherein curved lines represents covalent bonds between LINKER and AAs. Curved lines' lengths may not be representative of the actual relative distance between the LINKER and the AAs.

[0253] In certain embodiments, PEP1 is selected from the group consisting of SAIS, SSLS, NAIS, SATS, SPIS, EPIS, SPIN, KPLS, EPLP, EPLT, SNIT, RSVK and RPVQ.

[0254] In certain embodiments, PEP3 is selected from the group consisting of VPT, VPE, APT, TPT, VPA, APV, VPQ, VSQ, SRV and TQV.

[0255] In certain embodiments, PEP5 is a peptide of general formula PEP3-AA¹¹-AA¹²; wherein PEP3 is selected from the group consisting of VPT, VPE, APT, TPT, VPA, APV, VPQ, VSQ, SRV and TQV; wherein AA¹¹ is selected from the group consisting of E, K, Q, R, A, D, G and H; and wherein AA¹² is selected from the group consisting of L, M, T, E, Q and H. In one particular example, PEP5 is selected from the group consisting of VPTEL, VPEKM, APTKL, APTKL, VPTKL, TPTKM, VPARL, VPTRL, APVKT, VPQAL, VSQDL, VPQDL, VPTEE, VPTGQ, SRVHH and TQVQL.

[0256] In certain embodiments, PEP7 is an amino acid or a peptide with between two and seven amino acids of general formula AA′-AA²-AA³-AA⁴-AA⁵-AA⁶-AA⁷; wherein wherein AA¹, AA², AA³, AA⁴, and AA⁵ are independently absent or AA^{I} as defined herein; wherein AA⁶ is absent or selected from the group consisting of S, T, C, E, Q, P and R; wherein AA⁶ is absent or is selected from the group consisting of S, T, C, E, Q, P and R, and wherein at least one of AA¹, AA², AA³, AA⁴, AA⁵, AA⁶ or AA⁷ is not absent. In one particular example, PEP7 is selected from the group consisting of KIPKAXX, GIPEPXX, SIPKAXX, HVTKPTX, YVPKPXX, TVPKPXX, AVPKAXX, KVGKAXX, KASKAXX, GSAGPXX, AAPASXX, STPPTXX, HVPKPXX, RVPSTXX, ASAAPXX, ASASPXX, NDEGLEX, SSVKXQP and RNVQXRP, wherein X is C or S throughout the present description.

[0257] In certain embodiments, PEP9 is a peptide of general formula PEP7-PEP5; wherein PEP5 is a peptide of formula PEP3-AA¹¹-AA¹²; wherein PEP3 is selected from the group consisting of VPT, VPE, APT, TPT, VPA, APV, VPQ, VSQ, SRV and TQV; wherein AA¹¹ is selected from the group consisting of E, K, Q, R, A, D, G and H; and wherein AA¹² is selected from the group consisting of L, M, T, E, Q and H; wherein PEP7 is an amino acid or a peptide with between two and seven amino acids of general formula AA¹-AA²-AA³-AA⁴-AA⁵-AA⁶-AA⁷; wherein AA¹, AA², AA³, AA⁴, and AA⁵ are independently absent or AA^{I} as defined herein; wherein AA⁶ is absent or selected from the group consisting of S, T, C, E, Q, P and R; wherein AA⁷ is absent or is selected from the group consisting of S, T, C, E, Q, P and R. In one particular example, PEP9 is selected from the group consisting of KIPKAXXVPTEL, GIPEPXXVPEKM, SIPKAXXVPTEL, HVTKPTXAPTKL, YVPKPXXAPTKL, TVPKPXXAPTQL, AVPKAXXAPTKL, KVGKAXXVPTKL, KASKAXXVPTKL, GSAGPXXTPTKM, AAPASXXVPARL, STPPTXXVPTRL, HVPKPXXAPTKL, RVPSTXXAPVKT, ASAAPXXVPQAL, ASASPXXVSQDL, ASASPXXVPQDL, NDEGLEXVPTEE, NDEGLEXVPTGQ, SSVKXQPSRVHH and RNVQXRPTQVQL, wherein X is C or S throughout the present description.

[0258] In certain embodiments, PEP12 is a peptide of general formula PEP1-AA¹⁷-PEP11; wherein AA¹⁷ is selected from the group consisting of G, A, V, L, I, P, F, M, W, T and S (in particular is selected from the group consisting of M, I, L, V and T); wherein PEP1 is selected from the group consisting of SAIS, SSLS, NAIS, SATS, SPIS, EPIS, SPIN, KPLS, EPLP, EPLT, SNIT, RSVK and RPVQ.

[0259] In certain embodiments, PEP11 is a peptide with 3 amino acids of general formula AA¹⁸-AA¹⁹-AA²⁰; wherein AA¹⁸ is selected from the group consisting of L, V, Q, A and R; wherein AA¹⁹ is selected from the group consisting of F, W, H, Y, I and K; wherein AA²⁰ is selected from the group consisting of L, F, Y, K, I, V and M. In one particular example, PEP11 is selected from the group consisting of LYL, LFF, LYF, LYY, LYK, LYI, LFI, LYV, VYY, QIM, AKV and RKI.

[0260] In certain embodiments, PEP7 is selected from the group consisting of KIPKAXX, GIPEPXX, SIPKAXX, HVTKPTX, YVPKPXX, TVPKPXX, AVPKAXX, KVGKAXX, KASKAXX, GSAGPXX, AAPASXX, STPPTXX, HVPKPXX, RVPSTXX, ASAAPXX, ASASPXX, NDEGLEX, SSVKXQP and RNVQXRP; wherein PEP8 is selected from the group consisting of GXGXR, SXAXR, SXGXH, AXGXH, XGXR, EXGXR, RXGXS, AXGXR, SXGXR, XGXL, XKXS, KXEXR, QXEXR, LEXAXA and LAXKXE; and wherein the pair PEP7:PEP8 is selected from the group consisting of KIPKAXX:GXGXR, GIPEPXX:SXAXR, SIPKAXX:GXGXR, HVTKPTX:SXGXH, YVPKPXX:SXGXH, TVPKPXX:AXGXH, AVPKAXX:AXGXH, KVGKAXX:XGXR, KASKAXX:EXGXR, GSAGPXX:RXGXS, AAPASXX:AXGXR, STPPTXX:SXGXR, HVPKPXX:SXGXH, RVPSTXX:XGXL, ASAAPXX:XKXS, ASASPXX:XKXS, NDEGLEX:KXEXR, NDEGLEX:QXEXR, SSVKXQP:LEXAXA and RNVQXRP:LAXKXE.

[0261] In certain embodiments, PEP1 is selected from the group consisting of SAIS, SSLS, NAIS, SATS, SPIS, EPIS, SPIN, KPLS, EPLP, EPLT, SNIT, RSVK and RPVQ; PEP11 is selected from the group consisting of LYL, LFF, LYF, LYY, LYK, LYI, LFI, LYV, VYY, QIM, AKV and RKI; and the pair PEP1:PEP11 is selected from the group consisting of SAIS:LYL, SSLS:LFF, NAIS:LYF, SATS:LYY, SPIS:LYK, SPIS:LYI, SPIS:LFI, EPIS:LYL, SPIN:LYF, KPLS:LYV, EPLP:VYY, EPLT:LYY, SNIT:QIM, RSVK:AKV and RPVQ:RKI.

[0262] In particular, in certain embodiments, the pair PEP3:PEP1 is selected from the group consisting of VPT:SAIS, VPE:SAIS, APT:SAIS, TPT:SAIS, VPA:SAIS, APV:SAIS, VPQ:SAIS, VSQ:SAIS, SRV:SAIS, TQV:SAIS, VPE:SSLS, VPT:SSLS, APT:SSLS, TPT:SSLS, VPA:SSLS, APV:SSLS, VPQ:SSLS, VSQ:SSLS, SRV:SSLS, TQV:SSLS, APT:NAIS, VPT:NAIS, VPE:NAIS, TPT:NAIS, VPA:NAIS, APV:NAIS, VPQ:NAIS, VSQ:NAIS, SRV:NAIS, TQV:NAIS, APT:SATS, VPT:SATS, VPE:SATS, TPT:SATS, VPA:SATS, APV:SATS, VPQ:SATS, VSQ:SATS, SRV:SATS, TQV:SATS, VPT:SPIS, VPE:SPIS, APT:SPIS, TPT:SPIS, VPA:SPIS, APV:SPIS, VPQ:SPIS, VSQ:SPIS, SRV:SPIS, TQV:SPIS, VPT:EPIS, VPE:EPIS, APT:EPIS, TPT:EPIS, VPA:EPIS, APV:EPIS, VPQ:EPIS, VSQ:EPIS, SRV:EPIS, TQV:EPIS, TPT:SPIN, VPT:SPIN, VPE:SPIN, APT:SPIN, VPA:SPIN, APV:SPIN, VPQ:SPIN, VSQ:SPIN, SRV:SPIN, TQV:SPIN, APV:KPLS, VPT:KPLS, VPE:KPLS, APT:KPLS, TPT:KPLS, VPA:KPLS, VPQ:KPLS, VSQ:KPLS, SRV:KPLS, TQV:KPLS, VPQ:EPLP, VPT:EPLP, VPE:EPLP, APT:EPLP, TPT:EPLP, VPA:EPLP, APV:EPLP, VSQ:EPLP, SRV:EPLP, TQV:EPLP, VSQ:EPLT, VPT:EPLT, VPE:EPLT, APT:EPLT, TPT:EPLT, VPA:EPLT, APV:EPLT, VPQ:EPLT, SRV:EPLT, TQV:EPLT, VPT:SNIT, VPE:SNIT, APT:SNIT, TPT:SNIT, VPA:SNIT, APV:SNIT, VPQ:SNIT, VSQ:SNIT, SRV:SNIT, TQV:SNIT, SRV:RSVK, VPT:RSVK, VPE:RSVK, APT:RSVK, TPT:RSVK, VPA:RSVK, APV:RSVK, VPQ:RSVK, VSQ:RSVK, TQV:RSVK, TQV:RPVQ, VPT:RPVQ, VPE:RPVQ, APT:RPVQ, TPT:RPVQ, VPA:RPVQ, APV:RPVQ, VPQ:RPVQ, VSQ:RPVQ and SRV:RPVQ.

[0263] In particular, in certain embodiments, the pair PEP5:PEP1 is selected from the group consisting of VPTKM:SAIS, VPTKL:SAIS, VPTQL:SAIS, VPTRL:SAIS, VPTKT:SAIS, VPTAL:SAIS, VPTDL:SAIS, VPEKM:SAIS, APTKL:SAIS, APTQL:SAIS, TPTKM:SAIS, VPARL:SAIS, APVKT:SAIS, VPQAL:SAIS, VSQDL:SAIS, VPQDL:SAIS, SRVHH:SAIS, TQVQL:SAIS, VPEEL:SSLS, VPEKL:SSLS, VPEQL:SSLS, VPEKM:SSLS, VPERL:SSLS, VPEKT:SSLS, VPEAL:SSLS, VPEDL:SSLS, VPTEL:SSLS, APTKL:SSLS, APTQL:SSLS, VPTKL:SSLS, TPTKM:SSLS, VPARL:SSLS, VPTRLSSLS, APVKT:SSLS, VPQAL:SSLS, VSQDL:SSLS, VPQDL:SSLS, VPTEE:SSLS, VPTGQSSLS, SRVHH:SSLS, TQVQL:SSLS, APTEL:NAIS, APTKM:NAIS, APTKL:NAIS, APTRL:NAIS, APTKT:NAIS, APTAL:NAIS, APTDL:NAIS, VPTEL:NAIS, VPEKM:NAIS, VPTKL:NAIS, TPTKM:NAIS, VPARL:NAIS, VPTRL:NAIS, APVKT:NAIS, VPQAL:NAIS, VSQDL:NAIS, VPQDL:NAIS, VPTEE:NAIS, VPTGQ:NAIS, SRVHH:NAIS, TQVQL:NAIS, APTEL:SATS, APTKM:SATS, APTKL:SATS, APTQL:SATS, APTRL:SATS, APTKT:SATS, APTAL:SATS, APTDL:SATS, VPTEL:SATS, VPEKM:SATS, VPTKL:SATS, TPTKM:SATS, VPARL:SATS, VPTRL:SATS, APVKT:SATS, VPQAL:SATS, VSQDL:SATS, VPQDL:SATS, VPTEE:SATS, VPTGQ:SATS, SRVHH:SATS, TQVQL:SATS, VPTEL:SPIS, VPTKM:SPIS, VPTKL:SPIS, VPTQL:SPIS, VPTRL:SPIS, VPTKT:SPIS, VPTAL:SPIS, VPTDL:SPIS, VPEKM:SPIS, APTKL:SPIS, APTQL:SPIS, TPTKM:SPIS, VPARL:SPIS, APVKT:SPIS, VPQAL:SPIS, VSQDL:SPIS, VPQDL:SPIS, SRVHH:SPIS, TQVQL:SPIS, VPTEL:EPIS, VPTKM:EPIS, VPTKL:EPIS, VPTQL:EPIS, VPTRL:EPIS, VPTKT:EPIS, VPTAL:EPIS, VPTDL:EPIS, VPEKM:EPIS, APTKL:EPIS, APTQL:EPIS, TPTKM:EPIS, VPARL:EPIS, APVKT:EPIS, VPQAL:EPIS, VSQDL:EPIS, VPQDL:EPIS, SRVHH:EPIS, TQVQL:EPIS, TPTEL:SPIN, TPTKM:SPIN, TPTKL:SPIN, TPTQL:SPIN, TPTRL:SPIN, TPTKT:SPIN, TPTAL:SPIN, TPTDL:SPIN, VPTEL:SPIN, VPEKM:SPIN, APTKL:SPIN, APTQL:SPIN, VPTKL:SPIN, VPARL:SPIN, VPTRL:SPIN, APVKT:SPIN, VPQAL:SPIN, VSQDL:SPIN, VPQDL:SPIN, VPTEE:SPIN, VPTGQ:SPIN, SRVHH:SPIN, TQVQL:SPIN, VPAEL:SPIS, VPAKM:SPIS, VPAKL:SPIS, VPAQL:SPIS, VPAKT:SPIS, VPAAL:SPIS, VPADL:SPIS, VPTEE:SPIS, VPTGQ:SPIS, APVEL:KPLS, APVKM:KPLS, APVKL:KPLS, APVQL:KPLS, APVRL:KPLS, APVAL:KPLS, APVDL:KPLS, VPTEL:KPLS, VPEKM:KPLS, APTKL:KPLS, APTQL:KPLS, VPTKL:KPLS, TPTKM:KPLS, VPARL:KPLS, VPTRL:KPLS, VPQAL:KPLS, VSQDL:KPLS, VPQDL:KPLS, VPTEE:KPLS, VPTGQ:KPLS, SRVHH:KPLS, TQVQL:KPLS, VPQEL:EPLP, VPQKM:EPLP, VPQKL:EPLP, VPQQL:EPLP, VPQRL:EPLP, VPQKT:EPLP, VPQDL:EPLP, VPTEL:EPLP, VPEKM:EPLP, APTKL:EPLP, APTQL:EPLP, VPTKL:EPLP, TPTKM:EPLP, VPARL:EPLP, VPTRL:EPLP, APVKT:EPLP, VSQDL:EPLP, VPTEE:EPLP, VPTGQ:EPLP, SRVHH:EPLP, TQVQL:EPLP, VSQEL:EPLT, VSQKM:EPLT, VSQKL:EPLT, VSQQL:EPLT, VSQRL:EPLT, VSQKT:EPLT, VSQAL:EPLT, VSQDL:EPLT, VPTEL:EPLT, VPEKM:EPLT, APTKL:EPLT, APTQL:EPLT, VPTKL:EPLT, TPTKM:EPLT, VPARL:EPLT, VPTRL:EPLT, APVKT:EPLT, VPQAL:EPLT, VPTEE:EPLT, VPTGQ:EPLT, SRVHH:EPLT, TQVQL:EPLT, VPQEL:EPLT, VPQKM:EPLT, VPQKL:EPLT, VPQQL:EPLT, VPQRL:EPLT, VPQKT:EPLT, VPQDL:EPLT, VPTGQ:SNIT, VPEKM:SNIT, APTKL:SNIT, APTQL:SNIT, TPTKM:SNIT, VPARL:SNIT, APVKT:SNIT, VPQAL:SNIT, VSQDL:SNIT, VPQDL:SNIT, SRVHH:SNIT, TQVQL:SNIT, SRVQL:RSVK, VPTEL:RSVK, VPEKM:RSVK, APTKL:RSVK, APTQL:RSVK, VPTKL:RSVK, TPTKM:RSVK, VPARL:RSVK, VPTRL:RSVK, APVKT:RSVK, VPQAL:RSVK, VSQDL:RSVK, VPQDL:RSVK, VPTEE:RSVK, VPTGQ:RSVK, TQVQL:RSVK, TQVHH:RPVQ, VPTEL:RPVQ, VPEKM:RPVQ, APTKL:RPVQ, APTQL:RPVQ, VPTKL:RPVQ, TPTKM:RPVQ, VPARL:RPVQ, VPTRL:RPVQ, APVKT:RPVQ, VPQAL:RPVQ, VSQDL:RPVQ, VPQDL:RPVQ, VPTEE:RPVQ, VPTGQ:RPVQ and SRVHH:RPVQ.

[0264] In particular, in certain embodiments, the pair PEP7:PEP1 is selected from the group consisting of GIPEPXX:SAIS, HVTKPTX:SAIS, YVPKPXX:SAIS, TVPKPXX:SAIS, AVPKAXX:SAIS, KVGKAXX:SAIS, KASKAXX:SAIS, GSAGPXX:SAIS, AAPASXX:SAIS, STPPTXX:SAIS, HVPKPXX:SAIS, RVPSTXX:SAIS, ASAAPXX:SAIS, ASASPXX:SAIS, SSVKXQP:SAIS, RNVQXRP:SAIS, KIPKAXX:SSLS, SIPKAXX:SSLS, HVTKPTX:SSLS, YVPKPXX:SSLS, TVPKPXX:SSLS, AVPKAXX:SSLS, KVGKAXX:SSLS, KASKAXX:SSLS, GSAGPXX:SSLS, AAPASXX:SSLS, STPPTXX:SSLS, HVPKPXX:SSLS, RVPSTXX:SSLS, ASAAPXX:SSLS, ASASPXX:SSLS, NDEGLEX:SSLS, SSVKXQP:SSLS, RNVQXRP:SSLS, KIPKAXX:NAIS, GIPEPXX:NAIS, SIPKAXX:NAIS, AVPKAXX:NAIS, KVGKAXX:NAIS, KASKAXX:NAIS, GSAGPXX:NAIS, AAPASXX:NAIS, STPPTXX:NAIS, RVPSTXX:NAIS, ASAAPXX:NAIS, ASASPXX:NAIS, NDEGLEX:NAIS, SSVKXQP:NAIS, RNVQXRP:NAIS, KIPKAXX:SATS, GIPEPXX:SATS, SIPKAXX:SATS, HVTKPTX:SATS, YVPKPXX:SATS, TVPKPXX:SATS, KVGKAXX:SATS, KASKAXX:SATS, GSAGPXX:SATS, AAPASXX:SATS, STPPTXX:SATS, HVPKPXX:SATS, RVPSTXX:SATS, ASAAPXX:SATS, ASASPXX:SATS, NDEGLEX:SATS, SSVKXQP:SATS, RNVQXRP:SATS, KIPKAXX:SPIS, GIPEPXX:SPIS, SIPKAXX:SPIS, HVTKPTX:SPIS, YVPKPXX:SPIS, TVPKPXX:SPIS, AVPKAXX:SPIS, KASKAXX:SPIS, GSAGPXX:SPIS, AAPASXX:SPIS, STPPTXX:SPIS, HVPKPXX:SPIS, RVPSTXX:SPIS, ASAAPXX:SPIS, ASASPXX:SPIS, SSVKXQP:SPIS, RNVQXRP:SPIS, KIPKAXX:EPIS, GIPEPXX:EPIS, SIPKAXX:EPIS, HVTKPTX:EPIS, YVPKPXX:EPIS, TVPKPXX:EPIS, AVPKAXX:EPIS, KVGKAXX:EPIS, GSAGPXX:EPIS, AAPASXX:EPIS, STPPTXX:EPIS, HVPKPXX:EPIS, RVPSTXX:EPIS, ASAAPXX:EPIS, ASASPXX:EPIS, SSVKXQP:EPIS, RNVQXRP:EPIS, KIPKAXX:SPIN, GIPEPXX:SPIN, SIPKAXX:SPIN, HVTKPTX:SPIN, YVPKPXX:SPIN, TVPKPXX:SPIN, AVPKAXX:SPIN, KVGKAXX:SPIN, KASKAXX:SPIN, AAPASXX:SPIN, STPPTXX:SPIN, HVPKPXX:SPIN, RVPSTXX:SPIN, ASAAPXX:SPIN, ASASPXX:SPIN, NDEGLEX:SPIN, SSVKXQP:SPIN, RNVQXRP:SPIN, KVGKAXX:SPIS, NDEGLEX:SPIS, KIPKAXX:KPLS, GIPEPXX:KPLS, SIPKAXX:KPLS, HVTKPTX:KPLS, YVPKPXX:KPLS, TVPKPXX:KPLS, AVPKAXX:KPLS, KVGKAXX:KPLS, KASKAXX:KPLS, GSAGPXX:KPLS, AAPASXX:KPLS, STPPTXX:KPLS, HVPKPXX:KPLS, ASAAPXX:KPLS, ASASPXX:KPLS, NDEGLEX:KPLS, SSVKXQP:KPLS, RNVQXRP:KPLS, KIPKAXX:EPLP, GIPEPXX:EPLP, SIPKAXX:EPLP, HVTKPTX:EPLP, YVPKPXX:EPLP, TVPKPXX:EPLP, AVPKAXX:EPLP, KVGKAXX:EPLP, KASKAXX:EPLP, GSAGPXX:EPLP, AAPASXX:EPLP, STPPTXX:EPLP, HVPKPXX:EPLP, RVPSTXX:EPLP, ASASPXX:EPLP, NDEGLEX:EPLP, SSVKXQP:EPLP, RNVQXRP:EPLP, KIPKAXX:EPLT, GIPEPXX:EPLT, SIPKAXX:EPLT, HVTKPTX:EPLT, YVPKPXX:EPLT, TVPKPXX:EPLT, AVPKAXX:EPLT, KVGKAXX:EPLT, KASKAXX:EPLT, GSAGPXX:EPLT, AAPASXX:EPLT, STPPTXX:EPLT, HVPKPXX:EPLT, RVPSTXX:EPLT, ASAAPXX:EPLT, ASASPXX:EPLT, NDEGLEX:EPLT, SSVKXQP:EPLT, RNVQXRP:EPLT, NDEGLEX:SNIT, GIPEPXX:SNIT, HVTKPTX:SNIT, YVPKPXX:SNIT, TVPKPXX:SNIT, AVPKAXX:SNIT, GSAGPXX:SNIT, AAPASXX:SNIT, HVPKPXX:SNIT, RVPSTXX:SNIT, ASAAPXX:SNIT, ASASPXX:SNIT, SSVKXQP:SNIT, RNVQXRP:SNIT, RNVQXRP:RSVK, KIPKAXX:RSVK, GIPEPXX:RSVK, SIPKAXX:RSVK, HVTKPTX:RSVK, YVPKPXX:RSVK, TVPKPXX:RSVK, AVPKAXX:RSVK, KVGKAXX:RSVK, KASKAXX:RSVK, GSAGPXX:RSVK, AAPASXX:RSVK, STPPTXX:RSVK, HVPKPXX:RSVK, RVPSTXX:RSVK, ASAAPXX:RSVK, ASASPXX:RSVK, NDEGLEX:RSVK, SSVKXQP:RPVQ, KIPKAXX:RPVQ, GIPEPXX:RPVQ, SIPKAXX:RPVQ, HVTKPTX:RPVQ, YVPKPXX:RPVQ, TVPKPXX:RPVQ, AVPKAXX:RPVQ, KVGKAXX:RPVQ, KASKAXX:RPVQ, GSAGPXX:RPVQ, AAPASXX:RPVQ, STPPTXX:RPVQ, HVPKPXX:RPVQ, RVPSTXX:RPVQ, ASAAPXX:RPVQ, ASASPXX:RPVQ and NDEGLEX:RPVQ.

[0265] In particular, in certain embodiments, the pair PEP9:PEP1 is selected from the group consisting of GIPEPXXVPTKM:SAIS, HVTKPTXVPTKL:SAIS, YVPKPXXVPTKL:SAIS, TVPKPXXVPTQL:SAIS, AVPKAXXVPTKL:SAIS, KVGKAXXVPTKL:SAIS, KASKAXXVPTKL:SAIS, GSAGPXXTPTKM:SAIS, AAPASXXVPTRL:SAIS, STPPTXXVPTRL:SAIS, HVPKPXXVPTKL:SAIS, RVPSTXXVPTKT:SAIS, ASAAPXXVPTAL:SAIS, ASASPXXVPTDL:SAIS, GIPEPXXVPEKM:SAIS, HVTKPTXAPTKL:SAIS, YVPKPXXAPTKL:SAIS, TVPKPXXAPTQL:SAIS, AVPKAXXAPTKL:SAIS, GSAGPXXTPTKM:SAIS, AAPASXXVPARL:SAIS, HVPKPXXAPTKL:SAIS, RVPSTXXAPVKT:SAIS, ASAAPXXVPQAL:SAIS, ASASPXXVSQDL:SAIS, ASASPXXVPQDL:SAIS, SSVKXQPSRVHH:SAIS, RNVQXRPTQVQL:SAIS, KIPKAXXVPEEL:SSLS, SIPKAXXVPEEL:SSLS, HVTKPTXVPEKL:SSLS, YVPKPXXVPEKL:SSLS, TVPKPXXVPEQL:SSLS, AVPKAXXVPEKL:SSLS, KVGKAXXVPEKL:SSLS, KASKAXXVPEKL:SSLS, GSAGPXXVPEKM:SSLS, AAPASXXVPERL:SSLS, STPPTXXVPERL:SSLS, HVPKPXXVPEKL:SSLS, RVPSTXXVPEKT:SSLS, ASAAPXXVPEAL:SSLS, ASASPXXVPEDL:SSLS, KIPKAXXVPTEL:SSLS, SIPKAXXVPTEL:SSLS, HVTKPTXAPTKL:SSLS, YVPKPXXAPTKL:SSLS, TVPKPXXAPTQL:SSLS, AVPKAXXAPTKL:SSLS, KVGKAXXVPTKL:SSLS, KASKAXXVPTKL:SSLS, GSAGPXXTPTKM:SSLS, AAPASXXVPARL:SSLS, STPPTXXVPTRL:SSLS, HVPKPXXAPTKL:SSLS, RVPSTXXAPVKT:SSLS, ASAAPXXVPQAL:SSLS, ASASPXXVSQDL:SSLS, ASASPXXVPQDL:SSLS, NDEGLEXVPTEE:SSLS, NDEGLEXVPTGQ:SSLS, SSVKXQPSRVHH:SSLS, RNVQXRPTQVQL:SSLS, KIPKAXXAPTEL:NAIS, GIPEPXXAPTKM:NAIS, SIPKAXXAPTEL:NAIS, AVPKAXXAPTKL:NAIS, KVGKAXXAPTKL:NAIS, KASKAXXAPTKL:NAIS, GSAGPXXAPTKM:NAIS, AAPASXXAPTRL:NAIS, STPPTXXAPTRL:NAIS, RVPSTXXAPTKT:NAIS, ASAAPXXAPTAL:NAIS, ASASPXXAPTDL:NAIS, KIPKAXXVPTEL:NAIS, GIPEPXXVPEKM:NAIS, SIPKAXXVPTEL:NAIS, KVGKAXXVPTKL:NAIS, KASKAXXVPTKL:NAIS, GSAGPXXTPTKM:NAIS, AAPASXXVPARL:NAIS, STPPTXXVPTRL:NAIS, RVPSTXXAPVKT:NAIS, ASAAPXXVPQAL:NAIS, ASASPXXVSQDL:NAIS, ASASPXXVPQDL:NAIS, NDEGLEXVPTEE:NAIS, NDEGLEXVPTGQ:NAIS, SSVKXQPSRVHH:NAIS, RNVQXRPTQVQL:NAIS, KIPKAXXAPTEL:SATS, GIPEPXXAPTKM:SATS, SIPKAXXAPTEL:SATS, HVTKPTXAPTKL:SATS, YVPKPXXAPTKL:SATS, TVPKPXXAPTQL:SATS, KVGKAXXAPTKL:SATS, KASKAXXAPTKL:SATS, GSAGPXXAPTKM:SATS, AAPASXXAPTRL:SATS, STPPTXXAPTRL:SATS, HVPKPXXAPTKL:SATS, RVPSTXXAPTKT:SATS, ASAAPXXAPTAL:SATS, ASASPXXAPTDL:SATS, KIPKAXXVPTEL:SATS, GIPEPXXVPEKM:SATS, SIPKAXXVPTEL:SATS, KVGKAXXVPTKL:SATS, KASKAXXVPTKL:SATS, GSAGPXXTPTKM:SATS, AAPASXXVPARL:SATS, STPPTXXVPTRL:SATS, RVPSTXXAPVKT:SATS, ASAAPXXVPQAL:SATS, ASASPXXVSQDL:SATS, ASASPXXVPQDL:SATS, NDEGLEXVPTEE:SATS, NDEGLEXVPTGQ:SATS, SSVKXQPSRVHH:SATS, RNVQXRPTQVQL:SATS, KIPKAXXVPTEL:SPIS, GIPEPXXVPTKM:SPIS, SIPKAXXVPTEL:SPIS, HVTKPTXVPTKL:SPIS, YVPKPXXVPTKL:SPIS, TVPKPXXVPTQL:SPIS, AVPKAXXVPTKL:SPIS, KASKAXXVPTKL:SPIS, GSAGPXXVPTKM:SPIS, AAPASXXVPTRL:SPIS, STPPTXXVPTRL:SPIS, HVPKPXXVPTKL:SPIS, RVPSTXXVPTKT:SPIS, ASAAPXXVPTAL:SPIS, ASASPXXVPTDL:SPIS, GIPEPXXVPEKM:SPIS, HVTKPTXAPTKL:SPIS, YVPKPXXAPTKL:SPIS, TVPKPXXAPTQL:SPIS, AVPKAXXAPTKL:SPIS, GSAGPXXTPTKM:SPIS, AAPASXXVPARL:SPIS, HVPKPXXAPTKL:SPIS, RVPSTXXAPVKT:SPIS, ASAAPXXVPTAL:SPIS, ASASPXXVSQDL:SPIS, ASASPXXVPTDL:SPIS, SSVKXQPSRVHH:SPIS, RNVQXRPTQVQL:SPIS, KIPKAXXVPTEL:EPIS, GIPEPXXVPTKM:EPIS, SIPKAXXVPTEL:EPIS, HVTKPTXVPTKL:EPIS, YVPKPXXVPTKL:EPIS, TVPKPXXVPTQL:EPIS, AVPKAXXVPTKL:EPIS, KVGKAXXVPTKL:EPIS, GSAGPXXVPTKM:EPIS, AAPASXXVPTRL:EPIS, STPPTXXVPTRL:EPIS, HVPKPXXVPTKL:EPIS, RVPSTXXVPTKT:EPIS, ASAAPXXVPTAL:EPIS, ASASPXXVPTDL:EPIS, GIPEPXXVPEKM:EPIS, HVTKPTXAPTKL:EPIS, YVPKPXXAPTKL:EPIS, TVPKPXXAPTQL:EPIS, AVPKAXXAPTKL:EPIS, GSAGPXXTPTKM:EPIS, AAPASXXVPARL:EPIS, HVPKPXXAPTKL:EPIS, RVPSTXXAPVKT:EPIS, ASAAPXXVPQAL:EPIS, ASASPXXVSQDL:EPIS, ASASPXXVPQDL:EPIS, SSVKXQPSRVHH:EPIS, RNVQXRPTQVQL:EPIS, KIPKAXXTPTEL:SPIN, GIPEPXXTPTKM:SPIN, SIPKAXXTPTEL:SPIN, HVTKPTXTPTKL:SPIN, YVPKPXXTPTKL:SPIN, TVPKPXXTPTQL:SPIN, AVPKAXXTPTKL:SPIN, KVGKAXXTPTKL:SPIN, KASKAXXTPTKL:SPIN, AAPASXXTPTRL:SPIN, STPPTXXTPTRL:SPIN, HVPKPXXTPTKL:SPIN, RVPSTXXTPTKT:SPIN, ASAAPXXTPTAL:SPIN, ASASPXXTPTDL:SPIN, KIPKAXXVPTEL:SPIN, GIPEPXXVPEKM:SPIN, SIPKAXXVPTEL:SPIN, HVTKPTXAPTKL:SPIN, YVPKPXXAPTKL:SPIN, TVPKPXXAPTQL:SPIN, AVPKAXXAPTKL:SPIN, KVGKAXXVPTKL:SPIN, KASKAXXVPTKL:SPIN, AAPASXXVPARL:SPIN, STPPTXXVPTRL:SPIN, HVPKPXXAPTKL:SPIN, RVPSTXXAPVKT:SPIN, ASAAPXXVPQAL:SPIN, ASASPXXVSQDL:SPIN, ASASPXXVPQDL:SPIN, NDEGLEXVPTEE:SPIN, NDEGLEXVPTGQ:SPIN, SSVKXQPSRVHH:SPIN, RNVQXRPTQVQL:SPIN, KIPKAXXVPAEL:SPIS, GIPEPXXVPAKM:SPIS, SIPKAXXVPAEL:SPIS, HVTKPTXVPAKL:SPIS, YVPKPXXVPAKL:SPIS, TVPKPXXVPAQL:SPIS, AVPKAXXVPAKL:SPIS, KVGKAXXVPAKL:SPIS, KASKAXXVPAKL:SPIS, GSAGPXXVPAKM:SPIS, STPPTXXVPARL:SPIS, HVPKPXXVPAKL:SPIS, RVPSTXXVPAKT:SPIS, ASAAPXXVPAAL:SPIS, ASASPXXVPADL:SPIS, KVGKAXXVPTKL:SPIS, NDEGLEXVPTEE:SPIS, NDEGLEXVPTGQ:SPIS, KIPKAXXAPVEL:KPLS, GIPEPXXAPVKM:KPLS, SIPKAXXAPVEL:KPLS, HVTKPTXAPVKL:KPLS, YVPKPXXAPVKL:KPLS, TVPKPXXAPVQL:KPLS, AVPKAXXAPVKL:KPLS, KVGKAXXAPVKL:KPLS, KASKAXXAPVKL:KPLS, GSAGPXXAPVKM:KPLS, AAPASXXAPVRL:KPLS, STPPTXXAPVRL:KPLS, HVPKPXXAPVKL:KPLS, ASAAPXXAPVAL:KPLS, ASASPXXAPVDL:KPLS, KIPKAXXVPTEL:KPLS, GIPEPXXVPEKM:KPLS, SIPKAXXVPTEL:KPLS, HVTKPTXAPTKL:KPLS, YVPKPXXAPTKL:KPLS, TVPKPXXAPTQL:KPLS, AVPKAXXAPTKL:KPLS, KVGKAXXVPTKL:KPLS, KASKAXXVPTKL:KPLS, GSAGPXXTPTKM:KPLS, AAPASXXVPARL:KPLS, STPPTXXVPTRL:KPLS, HVPKPXXAPTKL:KPLS, ASAAPXXVPQAL:KPLS, ASASPXXVSQDL:KPLS, ASASPXXVPQDL:KPLS, NDEGLEXVPTEE:KPLS, NDEGLEXVPTGQ:KPLS, SSVKXQPSRVHH:KPLS, RNVQXRPTQVQL:KPLS, KIPKAXXVPQEL:EPLP, GIPEPXXVPQKM:EPLP, SIPKAXXVPQEL:EPLP, HVTKPTXVPQKL:EPLP, YVPKPXXVPQKL:EPLP, TVPKPXXVPQQL:EPLP, AVPKAXXVPQKL:EPLP, KVGKAXXVPQKL:EPLP, KASKAXXVPQKL:EPLP, GSAGPXXVPQKM:EPLP, AAPASXXVPQRL:EPLP, STPPTXXVPQRL:EPLP, HVPKPXXVPQKL:EPLP, RVPSTXXVPQKT:EPLP, ASASPXXVPQDL:EPLP, KIPKAXXVPTEL:EPLP, GIPEPXXVPEKM:EPLP, SIPKAXXVPTEL:EPLP, HVTKPTXAPTKL:EPLP, YVPKPXXAPTKL:EPLP, TVPKPXXAPTQL:EPLP, AVPKAXXAPTKL:EPLP, KVGKAXXVPTKL:EPLP, KASKAXXVPTKL:EPLP, GSAGPXXTPTKM:EPLP, AAPASXXVPARL:EPLP, STPPTXXVPTRL:EPLP, HVPKPXXAPTKL:EPLP, RVPSTXXAPVKT:EPLP, ASASPXXVSQDL:EPLP, NDEGLEXVPTEE:EPLP, NDEGLEXVPTGQ:EPLP, SSVKXQPSRVHH:EPLP, RNVQXRPTQVQL:EPLP, KIPKAXXVSQEL:EPLT, GIPEPXXVSQKM:EPLT, SIPKAXXVSQEL:EPLT, HVTKPTXVSQKL:EPLT, YVPKPXXVSQKL:EPLT, TVPKPXXVSQQL:EPLT, AVPKAXXVSQKL:EPLT, KVGKAXXVSQKL:EPLT, KASKAXXVSQKL:EPLT, GSAGPXXVSQKM:EPLT, AAPASXXVSQRL:EPLT, STPPTXXVSQRL:EPLT, HVPKPXXVSQKL:EPLT, RVPSTXXVSQKT:EPLT, ASAAPXXVSQAL:EPLT, ASASPXXVSQDL:EPLT, KIPKAXXVPTEL:EPLT, GIPEPXXVPEKM:EPLT, SIPKAXXVPTEL:EPLT, HVTKPTXAPTKL:EPLT, YVPKPXXAPTKL:EPLT, TVPKPXXAPTQL:EPLT, AVPKAXXAPTKL:EPLT, KVGKAXXVPTKL:EPLT, KASKAXXVPTKL:EPLT, GSAGPXXTPTKM:EPLT, AAPASXXVPARL:EPLT, STPPTXXVPTRL:EPLT, HVPKPXXAPTKL:EPLT, RVPSTXXAPVKT:EPLT, ASAAPXXVPQAL:EPLT, NDEGLEXVPTEE:EPLT, NDEGLEXVPTGQ:EPLT, SSVKXQPSRVHH:EPLT, RNVQXRPTQVQL:EPLT, KIPKAXXVPQEL:EPLT, GIPEPXXVPQKM:EPLT, SIPKAXXVPQEL:EPLT, HVTKPTXVPQKL:EPLT, YVPKPXXVPQKL:EPLT, TVPKPXXVPQQL:EPLT, AVPKAXXVPQKL:EPLT, KVGKAXXVPQKL:EPLT, KASKAXXVPQKL:EPLT, GSAGPXXVPQKM:EPLT, AAPASXXVPQRL:EPLT, STPPTXXVPQRL:EPLT, HVPKPXXVPQKL:EPLT, RVPSTXXVPQKT:EPLT, ASASPXXVPQDL:EPLT, NDEGLEXVPTGQ:SNIT, GIPEPXXVPEKM:SNIT, HVTKPTXAPTKL:SNIT, YVPKPXXAPTKL:SNIT, TVPKPXXAPTQL:SNIT, AVPKAXXAPTKL:SNIT, GSAGPXXTPTKM:SNIT, AAPASXXVPARL:SNIT, HVPKPXXAPTKL:SNIT, RVPSTXXAPVKT:SNIT, ASAAPXXVPQAL:SNIT, ASASPXXVSQDL:SNIT, ASASPXXVPQDL:SNIT, SSVKXQPSRVHH:SNIT, RNVQXRPTQVQL:SNIT, RNVQXRPSRVQL:RSVK, KIPKAXXVPTEL:RSVK, GIPEPXXVPEKM:RSVK, SIPKAXXVPTEL:RSVK, HVTKPTXAPTKL:RSVK, YVPKPXXAPTKL:RSVK, TVPKPXXAPTQL:RSVK, AVPKAXXAPTKL:RSVK, KVGKAXXVPTKL:RSVK, KASKAXXVPTKL:RSVK, GSAGPXXTPTKM:RSVK, AAPASXXVPARL:RSVK, STPPTXXVPTRL:RSVK, HVPKPXXAPTKL:RSVK, RVPSTXXAPVKT:RSVK, ASAAPXXVPQAL:RSVK, ASASPXXVSQDL:RSVK, ASASPXXVPQDL:RSVK, NDEGLEXVPTEE:RSVK, NDEGLEXVPTGQ:RSVK, RNVQXRPTQVQL:RSVK, SSVKXQPTQVHH:RPVQ, KIPKAXXVPTEL:RPVQ, GIPEPXXVPEKM:RPVQ, SIPKAXXVPTEL:RPVQ, HVTKPTXAPTKL:RPVQ, YVPKPXXAPTKL:RPVQ, TVPKPXXAPTQL:RPVQ, AVPKAXXAPTKL:RPVQ, KVGKAXXVPTKL:RPVQ, KASKAXXVPTKL:RPVQ, GSAGPXXTPTKM:RPVQ, AAPASXXVPARL:RPVQ, STPPTXXVPTRL:RPVQ, HVPKPXXAPTKL:RPVQ, RVPSTXXAPVKT:RPVQ, ASAAPXXVPQAL:RPVQ, ASASPXXVSQDL:RPVQ, ASASPXXVPQDL:RPVQ, NDEGLEXVPTEE:RPVQ, NDEGLEXVPTGQ:RPVQ and SSVKXQPSRVHH:RPVQ.

[0266] In particular, in certain embodiments, the pair PEP3:PEP12 is selected from the group consisting of VPT:SAIS-AA¹⁷-LYL, VPE:SAIS-AA¹⁷-LYL, APT:SAIS-AA¹⁷-LYL, TPT:SAIS-AA¹⁷-LYL, VPA:SAIS-AA¹⁷-LYL, APV:SAIS-AA¹⁷-LYL, VPQ:SAIS-AA¹⁷-LYL, VSQ:SAIS-AA¹⁷-LYL, SRV:SAIS-AA¹⁷-LYL, TQV:SAIS-AA¹⁷-LYL, VPE:SSLS-AA¹⁷-LFF, VPT:SSLS-AA¹⁷-LFF, APT:SSLS-AA¹⁷-LFF, TPT:SSLS-AA¹⁷-LFF, VPA:SSLS-AA¹⁷-LFF, APV:SSLS-AA¹⁷-LFF, VPQ:SSLS-AA¹⁷-LFF, VSQ:SSLS-AA¹⁷-LFF, SRV:SSLS-AA¹⁷-LFF, TQV:SSLS-AA¹⁷-LFF, APT:NAIS-AA¹⁷-LYF, VPT:NAIS-AA¹⁷-LYF, VPE:NAIS-AA¹⁷-LYF, TPT:NAIS-AA¹⁷-LYF, VPA:NAIS-AA¹⁷-LYF, APV:NAIS-AA¹⁷-LYF, VPQ:NAIS-AA¹⁷-LYF, VSQ:NAIS-AA¹⁷-LYF, SRV:NAIS-AA¹⁷-LYF, TQV:NAIS-AA¹⁷-LYF, APT:SATS-AA¹⁷-LYY, VPT:SATS-AA¹⁷-LYY, VPE:SATS-AA¹⁷-LYY, TPT:SATS-AA¹⁷-LYY, VPA:SATS-AA¹⁷-LYY, APV:SATS-AA¹⁷-LYY, VPQ:SATS-AA¹⁷-LYY, VSQ:SATS-AA¹⁷-LYY, SRV:SATS-AA¹⁷-LYY, TQV:SATS-AA¹⁷-LYY, VPT:SPIS-AA¹⁷-LYK, VPE:SPIS-AA¹⁷-LYK, APT:SPIS-AA¹⁷-LYK, TPT:SPIS-AA¹⁷-LYK, VPA:SPIS-AA¹⁷-LYK, APV:SPIS-AA¹⁷-LYK, VPQ:SPIS-AA¹⁷-LYK, VSQ:SPIS-AA¹⁷-LYK, SRV:SPIS-AA¹⁷-LYK, TQV:SPIS-AA¹⁷-LYK, VPT:EPIS-AA¹⁷-LYL, VPE:EPIS-AA¹⁷-LYL, APT:EPIS-AA¹⁷-LYL, TPT:EPIS-AA¹⁷-LYL, VPA:EPIS-AA¹⁷-LYL, APV:EPIS-AA¹⁷-LYL, VPQ:EPIS-AA¹⁷-LYL, VSQ:EPIS-AA¹⁷-LYL, SRV:EPIS-AA¹⁷-LYL, TQV:EPIS-AA¹⁷-LYL, TPT:SPIN-AA¹⁷-LYF, VPT:SPIN-AA¹⁷-LYF, VPE:SPIN-AA¹⁷-LYF, APT:SPIN-AA¹⁷-LYF, VPA:SPIN-AA¹⁷-LYF, APV:SPIN-AA¹⁷-LYF, VPQ:SPIN-AA¹⁷-LYF, VSQ:SPIN-AA¹⁷-LYF, SRV:SPIN-AA¹⁷-LYF, TQV:SPIN-AA¹⁷-LYF, VPA:SPIS-AA¹⁷-LYI, VPT:SPIS-AA¹⁷-LYI, VPE:SPIS-AA¹⁷-LYI, APT:SPIS-AA¹⁷-LYI, TPT:SPIS-AA¹⁷-LYI, APV:SPIS-AA¹⁷-LYI, VPQ:SPIS-AA¹⁷-LYI, VSQ:SPIS-AA¹⁷-LYI, SRV:SPIS-AA¹⁷-LYI, TQV:SPIS-AA¹⁷-LYI, VPT:SPIS-AA¹⁷-LFI, VPE:SPIS-AA¹⁷-LFI, APT:SPIS-AA¹⁷-LFI, TPT:SPIS-AA¹⁷-LFI, VPA:SPIS-AA¹⁷-LFI, APV:SPIS-AA¹⁷-LFI, VPQ:SPIS-AA¹⁷-LFI, VSQ:SPIS-AA¹⁷-LFI, SRV:SPIS-AA¹⁷-LFI, TQV:SPIS-AA¹⁷-LFI, APV:KPLS-AA¹⁷-LYV, VPT:KPLS-AA¹⁷-LYV, VPE:KPLS-AA¹⁷-LYV, APT:KPLS-AA¹⁷-LYV, TPT:KPLS-AA¹⁷-LYV, VPA:KPLS-AA¹⁷-LYV, VPQ:KPLS-AA¹⁷-LYV, VSQ:KPLS-AA¹⁷-LYV, SRV:KPLS-AA¹⁷-LYV, TQV:KPLS-AA¹⁷-LYV, VPQ:EPLP-AA¹⁷-VYY, VPT:EPLP-AA¹⁷-VYY, VPE:EPLP-AA¹⁷-VYY, APT:EPLP-AA¹⁷-VYY, TPT:EPLP-AA¹⁷-VYY, VPA:EPLP-AA¹⁷-VYY, APV:EPLP-AA¹⁷-VYY, VSQ:EPLP-AA¹⁷-VYY, SRV:EPLP-AA¹⁷-VYY, TQV:EPLP-AA¹⁷-VYY, VSQ:EPLT-AA¹⁷-LYY, VPT:EPLT-AA¹⁷-LYY, VPE:EPLT-AA¹⁷-LYY, APT:EPLT-AA¹⁷-LYY, TPT:EPLT-AA¹⁷-LYY, VPA:EPLT-AA¹⁷-LYY, APV:EPLT-AA¹⁷-LYY, VPQ:EPLT-AA¹⁷-LYY, SRV:EPLT-AA¹⁷-LYY, TQV:EPLT-AA¹⁷-LYY, VPT:SNIT-AA¹⁷-QIM, VPE:SNIT-AA¹⁷-QIM, APT:SNIT-AA¹⁷-QIM, TPT:SNIT-AA¹⁷-QIM, VPA:SNIT-AA¹⁷-QIM, APV:SNIT-AA¹⁷-QIM, VPQ:SNIT-AA¹⁷-QIM, VSQ:SNIT-AA¹⁷-QIM, SRV:SNIT-AA¹⁷-QIM, TQV:SNIT-AA¹⁷-QIM, SRV:RSVK-AA¹⁷-AKV, VPT:RSVK-AA¹⁷-AKV, VPE:RSVK-AA¹⁷-AKV, APT:RSVK-AA¹⁷-AKV, TPT:RSVK-AA¹⁷-AKV, VPA:RSVK-AA¹⁷-AKV, APV:RSVK-AA¹⁷-AKV, VPQ:RSVK-AA¹⁷-AKV, VSQ:RSVK-AA¹⁷-AKV, TQV:RSVK-AA¹⁷-AKV, TQV:RPVQ-AA¹⁷-RKI, VPT:RPVQ-AA¹⁷-RKI, VPE:RPVQ-AA¹⁷-RKI, APT:RPVQ-AA¹⁷-RKI, TPT:RPVQ-AA¹⁷-RKI, VPA:RPVQ-AA¹⁷-RKI, APV:RPVQ-AA¹⁷-RKI, VPQ:RPVQ-AA¹⁷-RKI, VSQ:RPVQ-AA¹⁷-RKI and SRV:RPVQ-AA¹⁷-RKI; and wherein AA¹⁷ is selected from the group consisting of G, A, V, L, I, P, F, M, W, T and S (in particular is selected from the group consisting of M, I, L, V and T).

[0267] In particular, in certain embodiments, the pair PEP12:PEP5 is selected from the group consisting of VPTKM:SAIS-AA¹⁷-LYL, VPTKL:SAIS-AA¹⁷-LYL, VPTQL:SAIS-AA¹⁷-LYL, VPTRL:SAIS-AA¹⁷-LYL, VPTKT:SAIS-AA¹⁷-LYL, VPTAL:SAIS-AA¹⁷-LYL, VPTDL:SAIS-AA¹⁷-LYL, VPEKM:SAIS-AA¹⁷-LYL, APTKL:SAIS-AA¹⁷-LYL, APTQL:SAIS-AA¹⁷-LYL, TPTKM:SAIS-AA¹⁷-LYL, VPARL:SAIS-AA¹⁷-LYL, APVKT:SAIS-AA¹⁷-LYL, VPQAL:SAIS-AA¹⁷-LYL, VSQDL:SAIS-AA¹⁷-LYL, VPQDL:SAIS-AA¹⁷-LYL, SRVHH:SAIS-AA¹⁷-LYL, TQVQL:SAIS-AA¹⁷-LYL, VPEEL:SSLS-AA¹⁷-LFF, VPEKL:SSLS-AA¹⁷-LFF, VPEQL:SSLS-AA¹⁷-LFF, VPEKM:SSLS-AA¹⁷-LFF, VPERL:SSLS-AA¹⁷-LFF, VPEKT:SSLS-AA¹⁷-LFF, VPEAL:SSLS-AA¹⁷-LFF, VPEDL:SSLS-AA¹⁷-LFF, VPTEL:SSLS-AA¹⁷-LFF, APTKL:SSLS-AA¹⁷-LFF, APTQL:SSLS-AA¹⁷-LFF, VPTKL:SSLS-AA¹⁷-LFF, TPTKM:SSLS-AA¹⁷-LFF, VPARL:SSLS-AA¹⁷-LFF, VPTRL:SSLS-AA¹⁷-LFF, APVKT:SSLS-AA¹⁷-LFF, VPQAL:SSLS-AA¹⁷-LFF, VSQDL:SSLS-AA¹⁷-LFF, VPQDL:SSLS-AA¹⁷-LFF, VPTEE:SSLS-AA¹⁷-LFF, VPTGQ:SSLS-AA¹⁷-LFF, SRVHH:SSLS-AA¹⁷-LFF, TQVQL:SSLS-AA¹⁷-LFF, APTEL:NAIS-AA¹⁷-LYF, APTKM:NAIS-AA¹⁷-LYF, APTKL:NAIS-AA¹⁷-LYF, APTRL:NAIS-AA¹⁷-LYF, APTKT:NAIS-AA¹⁷-LYF, APTAL:NAIS-AA¹⁷-LYF, APTDL:NAIS-AA¹⁷-LYF, VPTEL:NAIS-AA¹⁷-LYF, VPEKM:NAIS-AA¹⁷-LYF, VPTKL:NAIS-AA¹⁷-LYF, TPTKM:NAIS-AA¹⁷-LYF, VPARL:NAIS-AA¹⁷-LYF, VPTRL:NAIS-AA¹⁷-LYF, APVKT:NAIS-AA¹⁷-LYF, VPQAL:NAIS-AA¹⁷-LYF, VSQDL:NAIS-AA¹⁷-LYF, VPQDL:NAIS-AA¹⁷-LYF, VPTEE:NAIS-AA¹⁷-LYF, VPTGQ:NAIS-AA¹⁷-LYF, SRVHH:NAIS-AA¹⁷-LYF, TQVQL:NAIS-AA¹⁷-LYF, APTEL:SATS-AA¹⁷-LYY, APTKM:SATS-AA¹⁷-LYY, APTKL:SATS-AA¹⁷-LYY, APTQL:SATS-AA¹⁷-LYY, APTRL:SATS-AA¹⁷-LYY, APTKT:SATS-AA¹⁷-LYY, APTAL:SATS-AA¹⁷-LYY, APTDL:SATS-AA¹⁷-LYY, VPTEL:SATS-AA¹⁷-LYY, VPEKM:SATS-AA¹⁷-LYY, VPTKL:SATS-AA¹⁷-LYY, TPTKM:SATS-AA¹⁷-LYY, VPARL:SATS-AA¹⁷-LYY, VPTRL:SATS-AA¹⁷-LYY, APVKT:SATS-AA¹⁷-LYY, VPQAL:SATS-AA¹⁷-LYY, VSQDL:SATS-AA¹⁷-LYY, VPQDL:SATS-AA¹⁷-LYY, VPTEE:SATS-AA¹⁷-LYY, VPTGQ:SATS-AA¹⁷-LYY, SRVHH:SATS-AA¹⁷-LYY, TQVQL:SATS-AA¹⁷-LYY, VPTEL:SPIS-AA¹⁷-LYK, VPTKM:SPIS-AA¹⁷-LYK, VPTKL:SPIS-AA¹⁷-LYK, VPTQL:SPIS-AA¹⁷-LYK, VPTRL:SPIS-AA¹⁷-LYK, VPTKT:SPIS-AA¹⁷-LYK, VPTAL:SPIS-AA¹⁷-LYK, VPTDL:SPIS-AA¹⁷-LYK, VPEKM:SPIS-AA¹⁷-LYK, APTKL:SPIS-AA¹⁷-LYK, APTQL:SPIS-AA¹⁷-LYK, TPTKM:SPIS-AA¹⁷-LYK, VPARL:SPIS-AA¹⁷-LYK, APVKT:SPIS-AA¹⁷-LYK, VPQAL:SPIS-AA¹⁷-LYK, VSQDL:SPIS-AA¹⁷-LYK, VPQDL:SPIS-AA¹⁷-LYK, SRVHH:SPIS-AA¹⁷-LYK, TQVQL:SPIS-AA¹⁷-LYK, VPTEL:EPIS-AA¹⁷-LYL, VPTKM:EPIS-AA¹⁷-LYL, VPTKL:EPIS-AA¹⁷-LYL, VPTQL:EPIS-AA¹⁷-LYL, VPTRL:EPIS-AA¹⁷-LYL, VPTKT:EPIS-AA¹⁷-LYL, VPTAL:EPIS-AA¹⁷-LYL, VPTDL:EPIS-AA¹⁷-LYL, VPEKM:EPIS-AA¹⁷-LYL, APTKL:EPIS-AA¹⁷-LYL, APTQL:EPIS-AA¹⁷-LYL, TPTKM:EPIS-AA¹⁷-LYL, VPARL:EPIS-AA¹⁷-LYL, APVKT:EPIS-AA¹⁷-LYL, VPQAL:EPIS-AA¹⁷-LYL, VSQDL:EPIS-AA¹⁷-LYL, VPQDL:EPIS-AA¹⁷-LYL, SRVHH:EPIS-AA¹⁷-LYL, TQVQL:EPIS-AA¹⁷-LYL, TPTEL:SPIN-AA¹⁷-LYF, TPTKM:SPIN-AA¹⁷-LYF, TPTKL:SPIN-AA¹⁷-LYF, TPTQL:SPIN-AA¹⁷-LYF, TPTRL:SPIN-AA¹⁷-LYF, TPTKT:SPIN-AA¹⁷-LYF, TPTAL:SPIN-AA¹⁷-LYF, TPTDL:SPIN-AA¹⁷-LYF, VPTEL:SPIN-AA¹⁷-LYF, VPEKM:SPIN-AA¹⁷-LYF, APTKL:SPIN-AA¹⁷-LYF, APTQL:SPIN-AA¹⁷-LYF, VPTKL:SPIN-AA¹⁷-LYF, VPARL:SPIN-AA¹⁷-LYF, VPTRL:SPIN-AA¹⁷-LYF, APVKT:SPIN-AA¹⁷-LYF, VPQAL:SPIN-AA¹⁷-LYF, VSQDL:SPIN-AA¹⁷-LYF, VPQDL:SPIN-AA¹⁷-LYF, VPTEE:SPIN-AA¹⁷-LYF, VPTGQ:SPIN-AA¹⁷-LYF, SRVHH:SPIN-AA¹⁷-LYF, TQVQL:SPIN-AA¹⁷-LYF, VPAEL:SPIS-AA¹⁷-LYI, VPAKM:SPIS-AA¹⁷-LYI, VPAKL:SPIS-AA¹⁷-LYI, VPAQL:SPIS-AA¹⁷-LYI, VPARL:SPIS-AA¹⁷-LYI, VPAKT:SPIS-AA¹⁷-LYI, VPAAL:SPIS-AA¹⁷-LYI, VPADL:SPIS-AA¹⁷-LYI, VPTEL:SPIS-AA¹⁷-LYI, VPEKM:SPIS-AA¹⁷-LYI, APTKL:SPIS-AA¹⁷-LYI, APTQL:SPIS-AA¹⁷-LYI, VPTKL:SPIS-AA¹⁷-LYI, TPTKM:SPIS-AA¹⁷-LYI, VPTRL:SPIS-AA¹⁷-LYI, APVKT:SPIS-AA¹⁷-LYI, VPQAL:SPIS-AA¹⁷-LYI, VSQDL:SPIS-AA¹⁷-LYI, VPQDL:SPIS-AA¹⁷-LYI, VPTEE:SPIS-AA¹⁷-LYI, VPTGQ:SPIS-AA¹⁷-LYI, SRVHH:SPIS-AA¹⁷-LYI, TQVQL:SPIS-AA¹⁷-LYI, VPTEL:SPIS-AA¹⁷-LFI, VPTKM:SPIS-AA¹⁷-LFI, VPTKL:SPIS-AA¹⁷-LFI, VPTQL:SPIS-AA¹⁷-LFI, VPTRL:SPIS-AA¹⁷-LFI, VPTKT:SPIS-AA¹⁷-LFI, VPTAL:SPIS-AA¹⁷-LFI, VPTDL:SPIS-AA¹⁷-LFI, VPEKM:SPIS-AA¹⁷-LFI, APTKL:SPIS-AA¹⁷-LFI, APTQL:SPIS-AA¹⁷-LFI, TPTKM:SPIS-AA¹⁷-LFI, VPARL:SPIS-AA¹⁷-LFI, APVKT:SPIS-AA¹⁷-LFI, VPQAL:SPIS-AA¹⁷-LFI, VSQDL:SPIS-AA¹⁷-LFI, VPQDL:SPIS-AA¹⁷-LFI, SRVHH:SPIS-AA¹⁷-LFI, TQVQL:SPIS-AA¹⁷-LFI, APVEL:KPLS-AA¹⁷-LYV, APVKM:KPLS-AA¹⁷-LYV, APVKL:KPLS-AA¹⁷-LYV, APVQL:KPLS-AA¹⁷-LYV, APVRL:KPLS-AA¹⁷-LYV, APVAL:KPLS-AA¹⁷-LYV, APVDL:KPLS-AA¹⁷-LYV, VPTEL:KPLS-AA¹⁷-LYV, VPEKM:KPLS-AA¹⁷-LYV, APTKL:KPLS-AA¹⁷-LYV, APTQL:KPLS-AA¹⁷-LYV, VPTKL:KPLS-AA¹⁷-LYV, TPTKM:KPLS-AA¹⁷-LYV, VPARL:KPLS-AA¹⁷-LYV, VPTRL:KPLS-AA¹⁷-LYV, VPQAL:KPLS-AA¹⁷-LYV, VSQDL:KPLS-AA¹⁷-LYV, VPQDL:KPLS-AA¹⁷-LYV, VPTEE:KPLS-AA¹⁷-LYV, VPTGQ:KPLS-AA¹⁷-LYV, SRVHH:KPLS-AA¹⁷-LYV, TQVQL:KPLS-AA¹⁷-LYV, VPQEL:EPLP-AA¹⁷-VYY, VPQKM:EPLP-AA¹⁷-VYY, VPQKL:EPLP-AA¹⁷-VYY, VPQQL:EPLP-AA¹⁷-VYY, VPQRL:EPLP-AA¹⁷-VYY, VPQKT:EPLP-AA¹⁷-VYY, VPQDL:EPLP-AA¹⁷-VYY, VPTEL:EPLP-AA¹⁷-VYY, VPEKM:EPLP-AA¹⁷-VYY, APTKL:EPLP-AA¹⁷-VYY, APTQL:EPLP-AA¹⁷-VYY, VPTKL:EPLP-AA¹⁷-VYY, TPTKM:EPLP-AA¹⁷-VYY, VPARL:EPLP-AA¹⁷-VYY, VPTRL:EPLP-AA¹⁷-VYY, APVKT:EPLP-AA¹⁷-VYY, VSQDL:EPLP-AA¹⁷-VYY, VPTEE:EPLP-AA¹⁷-VYY, VPTGQ:EPLP-AA¹⁷-VYY, SRVHH:EPLP-AA¹⁷-VYY, TQVQL:EPLP-AA¹⁷-VYY, VSQEL:EPLT-AA¹⁷-LYY, VSQKM:EPLT-AA¹⁷-LYY, VSQKL:EPLT-AA¹⁷-LYY, VSQQL:EPLT-AA¹⁷-LYY, VSQRL:EPLT-AA¹⁷-LYY, VSQKT:EPLT-AA¹⁷-LYY, VSQAL:EPLT-AA¹⁷-LYY, VSQDL:EPLT-AA¹⁷-LYY, VPTEL:EPLT-AA¹⁷-LYY, VPEKM:EPLT-AA¹⁷-LYY, APTKL:EPLT-AA¹⁷-LYY, APTQL:EPLT-AA¹⁷-LYY, VPTKL:EPLT-AA¹⁷-LYY, TPTKM:EPLT-AA¹⁷-LYY, VPARL:EPLT-AA¹⁷-LYY, VPTRL:EPLT-AA¹⁷-LYY, APVKT:EPLT-AA¹⁷-LYY, VPQAL:EPLT-AA¹⁷-LYY, VPTEE:EPLT-AA¹⁷-LYY, VPTGQ:EPLT-AA¹⁷-LYY, SRVHH:EPLT-AA¹⁷-LYY, TQVQL:EPLT-AA¹⁷-LYY, VPQEL:EPLT-AA¹⁷-LYY, VPQKM:EPLT-AA¹⁷-LYY, VPQKL:EPLT-AA¹⁷-LYY, VPQQL:EPLT-AA¹⁷-LYY, VPQRL:EPLT-AA¹⁷-LYY, VPQKT:EPLT-AA¹⁷-LYY, VPQDL:EPLT-AA¹⁷-LYY, VPTGQ:SNIT-AA¹⁷-QIM, VPEKM:SNIT-AA¹⁷-QIM, APTKL:SNIT-AA¹⁷-QIM, APTQL:SNIT-AA¹⁷-QIM, TPTKM:SNIT-AA¹⁷-QIM, VPARL:SNIT-AA¹⁷-QIM, APVKT:SNIT-AA¹⁷-QIM, VPQAL:SNIT-AA¹⁷-QIM, VSQDL:SNIT-AA¹⁷-QIM, VPQDL:SNIT-AA¹⁷-QIM, SRVHH:SNIT-AA¹⁷-QIM, TQVQL:SNIT-AA¹⁷-QIM, SRVQL:RSVK-AA¹⁷-AKV, VPTEL:RSVK-AA¹⁷-AKV, VPEKM:RSVK-AA¹⁷-AKV, APTKL:RSVK-AA¹⁷-AKV, APTQL:RSVK-AA¹⁷-AKV, VPTKL:RSVK-AA¹⁷-AKV, TPTKM:RSVK-AA¹⁷-AKV, VPARL:RSVK-AA¹⁷-AKV, VPTRL:RSVK-AA¹⁷-AKV, APVKT:RSVK-AA¹⁷-AKV, VPQAL:RSVK-AA¹⁷-AKV, VSQDL:RSVK-AA¹⁷-AKV, VPQDL:RSVK-AA¹⁷-AKV, VPTEE:RSVK-AA¹⁷-AKV, VPTGQ:RSVK-AA¹⁷-AKV, TQVQL:RSVK-AA¹⁷-AKV, TQVHH:RPVQ-AA¹⁷-RKI, VPTEL:RPVQ-AA¹⁷-RKI, VPEKM:RPVQ-AA¹⁷-RKI, APTKL:RPVQ-AA¹⁷-RKI, APTQL:RPVQ-AA¹⁷-RKI, VPTKL:RPVQ-AA¹⁷-RKI, TPTKM:RPVQ-AA¹⁷-RKI, VPARL:RPVQ-AA¹⁷-RKI, VPTRL:RPVQ-AA¹⁷-RKI, APVKT:RPVQ-AA¹⁷-RKI, VPQAL:RPVQ-AA¹⁷-RKI, VSQDL:RPVQ-AA¹⁷-RKI, VPQDL:RPVQ-AA¹⁷-RKI, VPTEE:RPVQ-AA¹⁷-RKI, VPTGQ:RPVQ-AA¹⁷-RKI and SRVHH:RPVQ-AA¹⁷-RKI; and wherein AA¹⁷ is selected from the group consisting of G, A, V, L, I, P, F, M, W, T and S (in particular is selected from the group consisting of M, I, L, V and T).

[0268] In particular, in certain embodiments, the pair PEP12:PEP7 is selected from the group consisting of GIPEPXX:SAIS-AA¹⁷-LYL, HVTKPTX:SAIS-AA¹⁷-LYL, YVPKPXX:SAIS-AA¹⁷-LYL, TVPKPXX:SAIS-AA¹⁷-LYL, AVPKAXX:SAIS-AA¹⁷-LYL, KVGKAXX:SAIS-AA¹⁷-LYL, KASKAXX:SAIS-AA¹⁷-LYL, GSAGPXX:SAIS-AA¹⁷-LYL, AAPASXX:SAIS-AA¹⁷-LYL, STPPTXX:SAIS-AA¹⁷-LYL, HVPKPXX:SAIS-AA¹⁷-LYL, RVPSTXX:SAIS-AA¹⁷-LYL, ASAAPXX:SAIS-AA¹⁷-LYL, ASASPXX:SAIS-AA¹⁷-LYL, SSVKXQP:SAIS-AA¹⁷-LYL, RNVQXRP:SAIS-AA¹⁷-LYL, KIPKAXX:SSLS-AA¹⁷-LFF, SIPKAXX:SSLS-AA¹⁷-LFF, HVTKPTX:SSLS-AA¹⁷-LFF, YVPKPXX:SSLS-AA¹⁷-LFF, TVPKPXX:SSLS-AA¹⁷-LFF, AVPKAXX:SSLS-AA¹⁷-LFF, KVGKAXX:SSLS-AA¹⁷-LFF, KASKAXX:SSLS-AA¹⁷-LFF, GSAGPXX:SSLS-AA¹⁷-LFF, AAPASXX:SSLS-AA¹⁷-LFF, STPPTXX:SSLS-AA¹⁷-LFF, HVPKPXX:SSLS-AA¹⁷-LFF, RVPSTXX:SSLS-AA¹⁷-LFF, ASAAPXX:SSLS-AA¹⁷-LFF, ASASPXX:SSLS-AA¹⁷-LFF, NDEGLEX:SSLS-AA¹⁷-LFF, SSVKXQP:SSLS-AA¹⁷-LFF, RNVQXRP:SSLS-AA¹⁷-LFF, KIPKAXX:NAIS-AA¹⁷-LYF, GIPEPXX:NAIS-AA¹⁷-LYF, SIPKAXX:NAIS-AA¹⁷-LYF, AVPKAXX:NAIS-AA¹⁷-LYF, KVGKAXX:NAIS-AA¹⁷-LYF, KASKAXX:NAIS-AA¹⁷-LYF, GSAGPXX:NAIS-AA¹⁷-LYF, AAPASXX:NAIS-AA¹⁷-LYF, STPPTXX:NAIS-AA¹⁷-LYF, RVPSTXX:NAIS-AA¹⁷-LYF, ASAAPXX:NAIS-AA¹⁷-LYF, ASASPXX:NAIS-AA¹⁷-LYF, NDEGLEX:NAIS-AA¹⁷-LYF, SSVKXQP:NAIS-AA¹⁷-LYF, RNVQXRP:NAIS-AA¹⁷-LYF, KIPKAXX:SATS-AA¹⁷-LYY, GIPEPXX:SATS-AA¹⁷-LYY, SIPKAXX:SATS-AA¹⁷-LYY, HVTKPTX:SATS-AA¹⁷-LYY, YVPKPXX:SATS-AA¹⁷-LYY, TVPKPXX:SATS-AA¹⁷-LYY, KVGKAXX:SATS-AA¹⁷-LYY, KASKAXX:SATS-AA¹⁷-LYY, GSAGPXX:SATS-AA¹⁷-LYY, AAPASXX:SATS-AA¹⁷-LYY, STPPTXX:SATS-AA¹⁷-LYY, HVPKPXX:SATS-AA¹⁷-LYY, RVPSTXX:SATS-AA¹⁷-LYY, ASAAPXX:SATS-AA¹⁷-LYY, ASASPXX:SATS-AA¹⁷-LYY, NDEGLEX:SATS-AA¹⁷-LYY, SSVKXQP:SATS-AA¹⁷-LYY, RNVQXRP:SATS-AA¹⁷-LYY, KIPKAXX:SPIS-AA¹⁷-LYK, GIPEPXX:SPIS-AA¹⁷-LYK, SIPKAXX:SPIS-AA¹⁷-LYK, HVTKPTX:SPIS-AA¹⁷-LYK, YVPKPXX:SPIS-AA¹⁷-LYK, TVPKPXX:SPIS-AA¹⁷-LYK, AVPKAXX:SPIS-AA¹⁷-LYK, KASKAXX:SPIS-AA¹⁷-LYK, GSAGPXX:SPIS-AA¹⁷-LYK, AAPASXX:SPIS-AA¹⁷-LYK, STPPTXX:SPIS-AA¹⁷-LYK, HVPKPXX:SPIS-AA¹⁷-LYK, RVPSTXX:SPIS-AA¹⁷-LYK, ASAAPXX:SPIS-AA¹⁷-LYK, ASASPXX:SPIS-AA¹⁷-LYK, SSVKXQP:SPIS-AA¹⁷-LYK, RNVQXRP:SPIS-AA¹⁷-LYK, KIPKAXX:EPIS-AA¹⁷-LYL, GIPEPXX:EPIS-AA¹⁷-LYL, SIPKAXX:EPIS-AA¹⁷-LYL, HVTKPTX:EPIS-AA¹⁷-LYL, YVPKPXX:EPIS-AA¹⁷-LYL, TVPKPXX:EPIS-AA¹⁷-LYL, AVPKAXX:EPIS-AA¹⁷-LYL, KVGKAXX:EPIS-AA¹⁷-LYL, GSAGPXX:EPIS-AA¹⁷-LYL, AAPASXX:EPIS-AA¹⁷-LYL, STPPTXX:EPIS-AA¹⁷-LYL, HVPKPXX:EPIS-AA¹⁷-LYL, RVPSTXX:EPIS-AA¹⁷-LYL, ASAAPXX:EPIS-AA¹⁷-LYL, ASASPXX:EPIS-AA¹⁷-LYL, SSVKXQP:EPIS-AA¹⁷-LYL, RNVQXRP:EPIS-AA¹⁷-LYL, KIPKAXX:SPIN-AA¹⁷-LYF, GIPEPXX:SPIN-AA¹⁷-LYF, SIPKAXX:SPIN-AA¹⁷-LYF, HVTKPTX:SPIN-AA¹⁷-LYF, YVPKPXX:SPIN-AA¹⁷-LYF, TVPKPXX:SPIN-AA¹⁷-LYF, AVPKAXX:SPIN-AA¹⁷-LYF, KVGKAXX:SPIN-AA¹⁷-LYF, KASKAXX:SPIN-AA¹⁷-LYF, AAPASXX:SPIN-AA¹⁷-LYF, STPPTXX:SPIN-AA¹⁷-LYF, HVPKPXX:SPIN-AA¹⁷-LYF, RVPSTXX:SPIN-AA¹⁷-LYF, ASAAPXX:SPIN-AA¹⁷-LYF, ASASPXX:SPIN-AA¹⁷-LYF, NDEGLEX:SPIN-AA¹⁷-LYF, SSVKXQP:SPIN-AA¹⁷-LYF, RNVQXRP:SPIN-AA¹⁷-LYF, KIPKAXX:SPIS-AA¹⁷-LYI, GIPEPXX:SPIS-AA¹⁷-LYI, SIPKAXX:SPIS-AA¹⁷-LYI, HVTKPTX:SPIS-AA¹⁷-LYI, YVPKPXX:SPIS-AA¹⁷-LYI, TVPKPXX:SPIS-AA¹⁷-LYI, AVPKAXX:SPIS-AA¹⁷-LYI, KVGKAXX:SPIS-AA¹⁷-LYI, KASKAXX:SPIS-AA¹⁷-LYI, GSAGPXX:SPIS-AA¹⁷-LYI, STPPTXX:SPIS-AA¹⁷-LYI, HVPKPXX:SPIS-AA¹⁷-LYI, RVPSTXX:SPIS-AA¹⁷-LYI, ASAAPXX:SPIS-AA¹⁷-LYI, ASASPXX:SPIS-AA¹⁷-LYI, NDEGLEX:SPIS-AA¹⁷-LYI, SSVKXQP:SPIS-AA¹⁷-LYI, RNVQXRP:SPIS-AA¹⁷-LYI, KIPKAXX:SPIS-AA¹⁷-LFI, GIPEPXX:SPIS-AA¹⁷-LFI, SIPKAXX:SPIS-AA¹⁷-LFI, HVTKPTX:SPIS-AA¹⁷-LFI, YVPKPXX:SPIS-AA¹⁷-LFI, TVPKPXX:SPIS-AA¹⁷-LFI, AVPKAXX:SPIS-AA¹⁷-LFI, KVGKAXX:SPIS-AA¹⁷-LFI, KASKAXX:SPIS-AA¹⁷-LFI, GSAGPXX:SPIS-AA¹⁷-LFI, AAPASXX:SPIS-AA¹⁷-LFI, HVPKPXX:SPIS-AA¹⁷-LFI, RVPSTXX:SPIS-AA¹⁷-LFI, ASAAPXX:SPIS-AA¹⁷-LFI, ASASPXX:SPIS-AA¹⁷-LFI, SSVKXQP:SPIS-AA¹⁷-LFI, RNVQXRP:SPIS-AA¹⁷-LFI, KIPKAXX:KPLS-AA¹⁷-LYV, GIPEPXX:KPLS-AA¹⁷-LYV, SIPKAXX:KPLS-AA¹⁷-LYV, HVTKPTX:KPLS-AA¹⁷-LYV, YVPKPXX:KPLS-AA¹⁷-LYV, TVPKPXX:KPLS-AA¹⁷-LYV, AVPKAXX:KPLS-AA¹⁷-LYV, KVGKAXX:KPLS-AA¹⁷-LYV, KASKAXX:KPLS-AA¹⁷-LYV, GSAGPXX:KPLS-AA¹⁷-LYV, AAPASXX:KPLS-AA¹⁷-LYV, STPPTXX:KPLS-AA¹⁷-LYV, HVPKPXX:KPLS-AA¹⁷-LYV, ASAAPXX:KPLS-AA¹⁷-LYV, ASASPXX:KPLS-AA¹⁷-LYV, NDEGLEX:KPLS-AA¹⁷-LYV, SSVKXQP:KPLS-AA¹⁷-LYV, RNVQXRP:KPLS-AA¹⁷-LYV, KIPKAXX:EPLP-AA¹⁷-VYY, GIPEPXX:EPLP-AA¹⁷-VYY, SIPKAXX:EPLP-AA¹⁷-VYY, HVTKPTX:EPLP-AA¹⁷-VYY, YVPKPXX:EPLP-AA¹⁷-VYY, TVPKPXX:EPLP-AA¹⁷-VYY, AVPKAXX:EPLP-AA¹⁷-VYY, KVGKAXX:EPLP-AA¹⁷-VYY, KASKAXX:EPLP-AA¹⁷-VYY, GSAGPXX:EPLP-AA¹⁷-VYY, AAPASXX:EPLP-AA¹⁷-VYY, STPPTXX:EPLP-AA¹⁷-VYY, HVPKPXX:EPLP-AA¹⁷-VYY, RVPSTXX:EPLP-AA¹⁷-VYY, ASASPXX:EPLP-AA¹⁷-VYY, NDEGLEX:EPLP-AA¹⁷-VYY, SSVKXQP:EPLP-AA¹⁷-VYY, RNVQXRP:EPLP-AA¹⁷-VYY, KIPKAXX:EPLT-AA¹⁷-LYY, GIPEPXX:EPLT-AA¹⁷-LYY, SIPKAXX:EPLT-AA¹⁷-LYY, HVTKPTX:EPLT-AA¹⁷-LYY, YVPKPXX:EPLT-AA¹⁷-LYY, TVPKPXX:EPLT-AA¹⁷-LYY, AVPKAXX:EPLT-AA¹⁷-LYY, KVGKAXX:EPLT-AA¹⁷-LYY, KASKAXX:EPLT-AA¹⁷-LYY, GSAGPXX:EPLT-AA¹⁷-LYY, AAPASXX:EPLT-AA¹⁷-LYY, STPPTXX:EPLT-AA¹⁷-LYY, HVPKPXX:EPLT-AA¹⁷-LYY, RVPSTXX:EPLT-AA¹⁷-LYY, ASAAPXX:EPLT-AA¹⁷-LYY, ASASPXX:EPLT-AA¹⁷-LYY, NDEGLEX:EPLT-AA¹⁷-LYY, SSVKXQP:EPLT-AA¹⁷-LYY, RNVQXRP:EPLT-AA¹⁷-LYY, NDEGLEX:SNIT-AA¹⁷-QIM, GIPEPXX:SNIT-AA¹⁷-QIM, HVTKPTX:SNIT-AA¹⁷-QIM, YVPKPXX:SNIT-AA¹⁷-QIM, TVPKPXX:SNIT-AA¹⁷-QIM, AVPKAXX:SNIT-AA¹⁷-QIM, GSAGPXX:SNIT-AA¹⁷-QIM, AAPASXX:SNIT-AA¹⁷-QIM, HVPKPXX:SNIT-AA¹⁷-QIM, RVPSTXX:SNIT-AA¹⁷-QIM, ASAAPXX:SNIT-AA¹⁷-QIM, ASASPXX:SNIT-AA¹⁷-QIM, SSVKXQP:SNIT-AA¹⁷-QIM, RNVQXRP:SNIT-AA¹⁷-QIM, RNVQXRP:RSVK-AA¹⁷-AKV, KIPKAXX:RSVK-AA¹⁷-AKV, GIPEPXX:RSVK-AA¹⁷-AKV, SIPKAXX:RSVK-AA¹⁷-AKV, HVTKPTX:RSVK-AA¹⁷-AKV, YVPKPXX:RSVK-AA¹⁷-AKV, TVPKPXX:RSVK-AA¹⁷-AKV, AVPKAXX:RSVK-AA¹⁷-AKV, KVGKAXX:RSVK-AA¹⁷-AKV, KASKAXX:RSVK-AA¹⁷-AKV, GSAGPXX:RSVK-AA¹⁷-AKV, AAPASXX:RSVK-AA¹⁷-AKV, STPPTXX:RSVK-AA¹⁷-AKV, HVPKPXX:RSVK-AA¹⁷-AKV, RVPSTXX:RSVK-AA¹⁷-AKV, ASAAPXX:RSVK-AA¹⁷-AKV, ASASPXX:RSVK-AA¹⁷-AKV, NDEGLEX:RSVK-AA¹⁷-AKV, SSVKXQP:RPVQ-AA¹⁷-RKI, KIPKAXX:RPVQ-AA¹⁷-RKI, GIPEPXX:RPVQ-AA¹⁷-RKI, SIPKAXX:RPVQ-AA¹⁷-RKI, HVTKPTX:RPVQ-AA¹⁷-RKI, YVPKPXX:RPVQ-AA¹⁷-RKI, TVPKPXX:RPVQ-AA¹⁷-RKI, AVPKAXX:RPVQ-AA¹⁷-RKI, KVGKAXX:RPVQ-AA¹⁷-RKI, KASKAXX:RPVQ-AA¹⁷-RKI, GSAGPXX:RPVQ-AA¹⁷-RKI, AAPASXX:RPVQ-AA¹⁷-RKI, STPPTXX:RPVQ-AA¹⁷-RKI, HVPKPXX:RPVQ-AA¹⁷-RKI, RVPSTXX:RPVQ-AA¹⁷-RKI, ASAAPXX:RPVQ-AA¹⁷-RKI, ASASPXX:RPVQ-AA¹⁷-RKI and NDEGLEX:RPVQ-AA¹⁷-RKI; and wherein AA¹⁷ is selected from the group consisting of G, A, V, L, I, P, F, M, W, T and S (in particular is selected from the group consisting of M, I, L, V and T).

[0269] In particular, in certain embodiments, the pair PEP12:PEP9 is selected from the group consisting of GIPEPXXVPTKM:SAIS-AA¹⁷-LYL, HVTKPTXVPTKL:SAIS-AA¹⁷-LYL, YVPKPXXVPTKL:SAIS-AA¹⁷-LYL, TVPKPXXVPTQL:SAIS-AA¹⁷-LYL, AVPKAXXVPTKL:SAIS-AA¹⁷-LYL, KVGKAXXVPTKL:SAIS-AA¹⁷-LYL, KASKAXXVPTKL:SAIS-AA¹⁷-LYL, GSAGPXXVPTKM:SAIS-AA¹⁷-LYL, AAPASXXVPTRL:SAIS-AA¹⁷-LYL, STPPTXXVPTRL:SAIS-AA¹⁷-LYL, HVPKPXXVPTKL:SAIS-AA¹⁷-LYL, RVPSTXXVPTKT:SAIS-AA¹⁷-LYL, ASAAPXXVPTAL:SAIS-AA¹⁷-LYL, ASASPXXVPTDL:SAIS-AA¹⁷-LYL, GIPEPXXVPEKM:SAIS-AA¹⁷-LYL, HVTKPTXAPTKL:SAIS-AA¹⁷-LYL, YVPKPXXAPTKL:SAIS-AA¹⁷-LYL, TVPKPXXAPTQL:SAIS-AA¹⁷-LYL, AVPKAXXAPTKL:SAIS-AA¹⁷-LYL, GSAGPXXTPTKM:SAIS-AA¹⁷-LYL, AAPASXXVPARL:SAIS-AA¹⁷-LYL, HVPKPXXAPTKL:SAIS-AA¹⁷-LYL, RVPSTXXAPVKT:SAIS-AA¹⁷-LYL, ASAAPXXVPQAL:SAIS-AA¹⁷-LYL, ASASPXXVSQDL:SAIS-AA¹⁷-LYL, ASASPXXVPQDL:SAIS-AA¹⁷-LYL, SSVKXQPSRVHH:SAIS-AA¹⁷-LYL, RNVQXRPTQVQL:SAIS-AA¹⁷-LYL, KIPKAXXVPEEL:SSLS-AA¹⁷-LFF, SIPKAXXVPEEL:SSLS-AA¹⁷-LFF, HVTKPTXVPEKL:SSLS-AA¹⁷-LFF, YVPKPXXVPEKL:SSLS-AA¹⁷-LFF, TVPKPXXVPEQL:SSLS-AA¹⁷-LFF, AVPKAXXVPEKL:SSLS-AA¹⁷-LFF, KVGKAXXVPEKL:SSLS-AA¹⁷-LFF, KASKAXXVPEKL:SSLS-AA¹⁷-LFF, GSAGPXXVPEKM:SSLS-AA¹⁷-LFF, AAPASXXVPERL:SSLS-AA¹⁷-LFF, STPPTXXVPERL:SSLS-AA¹⁷-LFF, HVPKPXXVPEKL:SSLS-AA¹⁷-LFF, RVPSTXXVPEKT:SSLS-AA¹⁷-LFF, ASAAPXXVPEAL:SSLS-AA¹⁷-LFF, ASASPXXVPEDL:SSLS-AA¹⁷-LFF, KIPKAXXVPTEL:SSLS-AA¹⁷-LFF, SIPKAXXVPTEL:SSLS-AA¹⁷-LFF, HVTKPTXAPTKL:SSLS-AA¹⁷-LFF, YVPKPXXAPTKL:SSLS-AA¹⁷-LFF, TVPKPXXAPTQL:SSLS-AA¹⁷-LFF, AVPKAXXAPTKL:SSLS-AA¹⁷-LFF, KVGKAXXVPTKL:SSLS-AA¹⁷-LFF, KASKAXXVPTKL:SSLS-AA¹⁷-LFF, GSAGPXXTPTKM:SSLS-AA¹⁷-LFF, AAPASXXVPARL:SSLS-AA¹⁷-LFF, STPPTXXVPTRL:SSLS-AA¹⁷-LFF, HVPKPXXAPTKL:SSLS-AA¹⁷-LFF, RVPSTXXAPVKT:SSLS-AA¹⁷-LFF, ASAAPXXVPQAL:SSLS-AA¹⁷-LFF, ASASPXXVSQDL:SSLS-AA¹⁷-LFF, ASASPXXVPQDL:SSLS-AA¹⁷-LFF, NDEGLEXVPTEE:SSLS-AA¹⁷-LFF, NDEGLEXVPTGQ:SSLS-AA¹⁷-LFF, SSVKXQPSRVHH:SSLS-AA¹⁷-LFF, RNVQXRPTQVQL:SSLS-AA¹⁷-LFF, KIPKAXXAPTEL:NAIS-AA¹⁷-LYF, GIPEPXXAPTKM:NAIS-AA¹⁷-LYF, SIPKAXXAPTEL:NAIS-AA¹⁷-LYF, AVPKAXXAPTKL:NAIS-AA¹⁷-LYF, KVGKAXXAPTKL:NAIS-AA¹⁷-LYF, KASKAXXAPTKL:NAIS-AA¹⁷-LYF, GSAGPXXAPTKM:NAIS-AA¹⁷-LYF, AAPASXXAPTRL:NAIS-AA¹⁷-LYF, STPPTXXAPTRL:NAIS-AA¹⁷-LYF, RVPSTXXAPTKT:NAIS-AA¹⁷-LYF, ASAAPXXAPTAL:NAIS-AA¹⁷-LYF, ASASPXXAPTDL:NAIS-AA¹⁷-LYF, KIPKAXXVPTEL:NAIS-AA¹⁷-LYF, GIPEPXXVPEKM:NAIS-AA¹⁷-LYF, SIPKAXXVPTEL:NAIS-AA¹⁷-LYF, KVGKAXXVPTKL:NAIS-AA¹⁷-LYF, KASKAXXVPTKL:NAIS-AA¹⁷-LYF, GSAGPXXTPTKM:NAIS-AA¹⁷-LYF, AAPASXXVPARL:NAIS-AA¹⁷-LYF, STPPTXXVPTRL:NAIS-AA¹⁷-LYF, RVPSTXXAPVKT:NAIS-AA¹⁷-LYF, ASAAPXXVPQAL:NAIS-AA¹⁷-LYF, ASASPXXVSQDL:NAIS-AA¹⁷-LYF, ASASPXXVPQDL:NAIS-AA¹⁷-LYF, NDEGLEXVPTEE:NAIS-AA¹⁷-LYF, NDEGLEXVPTGQ:NAIS-AA¹⁷-LYF, SSVKXQPSRVHH:NAIS-AA¹⁷-LYF, RNVQXRPTQVQL:NAIS-AA¹⁷-LYF, KIPKAXXAPTEL:SATS-AA¹⁷-LYY, GIPEPXXAPTKM:SATS-AA¹⁷-LYY, SIPKAXXAPTEL:SATS-AA¹⁷-LYY, HVTKPTXAPTKL:SATS-AA¹⁷-LYY, YVPKPXXAPTKL:SATS-AA¹⁷-LYY, TVPKPXXAPTQL:SATS-AA¹⁷-LYY, KVGKAXXAPTKL:SATS-AA¹⁷-LYY, KASKAXXAPTKL:SATS-AA¹⁷-LYY, GSAGPXXAPTKM:SATS-AA¹⁷-LYY, AAPASXXAPTRL:SATS-AA¹⁷-LYY, STPPTXXAPTRL:SATS-AA¹⁷-LYY, HVPKPXXAPTKL:SATS-AA¹⁷-LYY, RVPSTXXAPTKT:SATS-AA¹⁷-LYY, ASAAPXXAPTAL:SATS-AA¹⁷-LYY, ASASPXXAPTDL:SATS-AA¹⁷-LYY, KIPKAXXVPTEL:SATS-AA¹⁷-LYY, GIPEPXXVPEKM:SATS-AA¹⁷-LYY, SIPKAXXVPTEL:SATS-AA¹⁷-LYY, KVGKAXXVPTKL:SATS-AA¹⁷-LYY, KASKAXXVPTKL:SATS-AA¹⁷-LYY, GSAGPXXTPTKM:SATS-AA¹⁷-LYY, AAPASXXVPARL:SATS-AA¹⁷-LYY, STPPTXXVPTRL:SATS-AA¹⁷-LYY, RVPSTXXAPVKT:SATS-AA¹⁷-LYY, ASAAPXXVPQAL:SATS-AA¹⁷-LYY, ASASPXXVSQDL:SATS-AA¹⁷-LYY, ASASPXXVPQDL:SATS-AA¹⁷-LYY, NDEGLEXVPTEE:SATS-AA¹⁷-LYY, NDEGLEXVPTGQ:SATS-AA¹⁷-LYY, SSVKXQPSRVHH:SATS-AA¹⁷-LYY, RNVQXRPTQVQL:SATS-AA¹⁷-LYY, KIPKAXXVPTEL:SPIS-AA¹⁷-LYK, GIPEPXXVPTKM:SPIS-AA¹⁷-LYK, SIPKAXXVPTEL:SPIS-AA¹⁷-LYK, HVTKPTXVPTKL:SPIS-AA¹⁷-LYK, YVPKPXXVPTKL:SPIS-AA¹⁷-LYK, TVPKPXXVPTQL:SPIS-AA¹⁷-LYK, AVPKAXXVPTKL:SPIS-AA¹⁷-LYK, KASKAXXVPTKL:SPIS-AA¹⁷-LYK, GSAGPXXVPTKM:SPIS-AA¹⁷-LYK, AAPASXXVPTRL:SPIS-AA¹⁷-LYK, STPPTXXVPTRL:SPIS-AA¹⁷-LYK, HVPKPXXVPTKL:SPIS-AA¹⁷-LYK, RVPSTXXVPTKT:SPIS-AA¹⁷-LYK, ASAAPXXVPTAL:SPIS-AA¹⁷-LYK, ASASPXXVPTDL:SPIS-AA¹⁷-LYK, GIPEPXXVPEKM:SPIS-AA¹⁷-LYK, HVTKPTXAPTKL:SPIS-AA¹⁷-LYK, YVPKPXXAPTKL:SPIS-AA¹⁷-LYK, TVPKPXXAPTQL:SPIS-AA¹⁷-LYK, AVPKAXXAPTKL:SPIS-AA¹⁷-LYK, GSAGPXXTPTKM:SPIS-AA¹⁷-LYK, AAPASXXVPARL:SPIS-AA¹⁷-LYK, HVPKPXXAPTKL:SPIS-AA¹⁷-LYK, RVPSTXXAPVKT:SPIS-AA¹⁷-LYK, ASAAPXXVPQAL:SPIS-AA¹⁷-LYK, ASASPXXVSQDL:SPIS-AA¹⁷-LYK, ASASPXXVPQDL:SPIS-AA¹⁷-LYK, SSVKXQPSRVHH:SPIS-AA¹⁷-LYK, RNVQXRPTQVQL:SPIS-AA¹⁷-LYK, KIPKAXXVPTEL:EPIS-AA¹⁷-LYL, GIPEPXXVPTKM:EPIS-AA¹⁷-LYL, SIPKAXXVPTEL:EPIS-AA¹⁷-LYL, HVTKPTXVPTKL:EPIS-AA¹⁷-LYL, YVPKPXXVPTKL:EPIS-AA¹⁷-LYL, TVPKPXXVPTQL:EPIS-AA¹⁷-LYL, AVPKAXXVPTKL:EPIS-AA¹⁷-LYL, KVGKAXXVPTKL:EPIS-AA¹⁷-LYL, GSAGPXXVPTKM:EPIS-AA¹⁷-LYL, AAPASXXVPTRL:EPIS-AA¹⁷-LYL, STPPTXXVPTRL:EPIS-AA¹⁷-LYL, HVPKPXXVPTKL:EPIS-AA¹⁷-LYL, RVPSTXXVPTKT:EPIS-AA¹⁷-LYL, ASAAPXXVPTAL:EPIS-AA¹⁷-LYL, ASASPXXVPTDL:EPIS-AA¹⁷-LYL, GIPEPXXVPEKM:EPIS-AA¹⁷-LYL, HVTKPTXAPTKL:EPIS-AA¹⁷-LYL, YVPKPXXAPTKL:EPIS-AA¹⁷-LYL, TVPKPXXAPTQL:EPIS-AA¹⁷-LYL, AVPKAXXAPTKL:EPIS-AA¹⁷-LYL, GSAGPXXTPTKM:EPIS-AA¹⁷-LYL, AAPASXXVPARL:EPIS-AA¹⁷-LYL, HVPKPXXAPTKL:EPIS-AA¹⁷-LYL, RVPSTXXAPVKT:EPIS-AA¹⁷-LYL, ASAAPXXVPQAL:EPIS-AA¹⁷-LYL, ASASPXXVSQDL:EPIS-AA¹⁷-LYL, ASASPXXVPQDL:EPIS-AA¹⁷-LYL, SSVKXQPSRVHH:EPIS-AA¹⁷-LYL, RNVQXRPTQVQL:EPIS-AA¹⁷-LYL, KIPKAXXTPTEL:SPIN-AA¹⁷-LYF, GIPEPXXTPTKM:SPIN-AA¹⁷-LYF, SIPKAXXTPTEL:SPIN-AA¹⁷-LYF, HVTKPTXTPTKL:SPIN-AA¹⁷-LYF, YVPKPXXTPTKL:SPIN-AA¹⁷-LYF, TVPKPXXTPTQL:SPIN-AA¹⁷-LYF, AVPKAXXTPTKL:SPIN-AA¹⁷-LYF, KVGKAXXTPTKL:SPIN-AA¹⁷-LYF, KASKAXXTPTKL:SPIN-AA¹⁷-LYF, AAPASXXTPTRL:SPIN-AA¹⁷-LYF, STPPTXXTPTRL:SPIN-AA¹⁷-LYF, HVPKPXXTPTKL:SPIN-AA¹⁷-LYF, RVPSTXXTPTKT:SPIN-AA¹⁷-LYF, ASAAPXXTPTAL:SPIN-AA¹⁷-LYF, ASASPXXTPTDL:SPIN-AA¹⁷-LYF, KIPKAXXVPTEL:SPIN-AA¹⁷-LYF, GIPEPXXVPEKM:SPIN-AA¹⁷-LYF, SIPKAXXVPTEL:SPIN-AA¹⁷-LYF, HVTKPTXAPTKL:SPIN-AA¹⁷-LYF, YVPKPXXAPTKL:SPIN-AA¹⁷-LYF, TVPKPXXAPTQL:SPIN-AA¹⁷-LYF, AVPKAXXAPTKL:SPIN-AA¹⁷-LYF, KVGKAXXVPTKL:SPIN-AA¹⁷-LYF, KASKAXXVPTKL:SPIN-AA¹⁷-LYF, AAPASXXVPARL:SPIN-AA¹⁷-LYF, STPPTXXVPTRL:SPIN-AA¹⁷-LYF, HVPKPXXAPTKL:SPIN-AA¹⁷-LYF, RVPSTXXAPVKT:SPIN-AA¹⁷-LYF, ASAAPXXVPQAL:SPIN-AA¹⁷-LYF, ASASPXXVSQDL:SPIN-AA¹⁷-LYF, ASASPXXVPQDL:SPIN-AA¹⁷-LYF, NDEGLEXVPTEE:SPIN-AA¹⁷-LYF, NDEGLEXVPTGQ:SPIN-AA¹⁷-LYF, SSVKXQPSRVHH:SPIN-AA¹⁷-LYF, RNVQXRPTQVQL:SPIN-AA¹⁷-LYF, KIPKAXXVPAEL:SPIS-AA¹⁷-LYI, GIPEPXXVPAKM:SPIS-AA¹⁷-LYI, SIPKAXXVPAEL:SPIS-AA¹⁷-LYI, HVTKPTXVPAKL:SPIS-AA¹⁷-LYI, YVPKPXXVPAKL:SPIS-AA¹⁷-LYI, TVPKPXXVPAQL:SPIS-AA¹⁷-LYI, AVPKAXXVPAKL:SPIS-AA¹⁷-LYI, KVGKAXXVPAKL:SPIS-AA¹⁷-LYI, KASKAXXVPAKL:SPIS-AA¹⁷-LYI, GSAGPXXVPAKM:SPIS-AA¹⁷-LYI, STPPTXXVPARL:SPIS-AA¹⁷-LYI, HVPKPXXVPAKL:SPIS-AA¹⁷-LYI, RVPSTXXVPAKT:SPIS-AA¹⁷-LYI, ASAAPXXVPAAL:SPIS-AA¹⁷-LYI, ASASPXXVPADL:SPIS-AA¹⁷-LYI, KIPKAXXVPTEL:SPIS-AA¹⁷-LYI, GIPEPXXVPEKM:SPIS-AA¹⁷-LYI, SIPKAXXVPTEL:SPIS-AA¹⁷-LYI, HVTKPTXAPTKL:SPIS-AA¹⁷-LYI, YVPKPXXAPTKL:SPIS-AA¹⁷-LYI, TVPKPXXAPTQL:SPIS-AA¹⁷-LYI, AVPKAXXAPTKL:SPIS-AA¹⁷-LYI, KVGKAXXVPTKL:SPIS-AA¹⁷-LYI, KASKAXXVPTKL:SPIS-AA¹⁷-LYI, GSAGPXXTPTKM:SPIS-AA¹⁷-LYI, STPPTXXVPTRL:SPIS-AA¹⁷-LYI, HVPKPXXAPTKL:SPIS-AA¹⁷-LYI, RVPSTXXAPVKT:SPIS-AA¹⁷-LYI, ASAAPXXVPQAL:SPIS-AA¹⁷-LYI, ASASPXXVSQDL:SPIS-AA¹⁷-LYI, ASASPXXVPQDL:SPIS-AA¹⁷-LYI, NDEGLEXVPTEE:SPIS-AA¹⁷-LYI, NDEGLEXVPTGQ:SPIS-AA¹⁷-LYI, SSVKXQPSRVHH:SPIS-AA¹⁷-LYI, RNVQXRPTQVQL:SPIS-AA¹⁷-LYI, KIPKAXXVPTEL:SPIS-AA¹⁷-LFI, GIPEPXXVPTKM:SPIS-AA¹⁷-LFI, SIPKAXXVPTEL:SPIS-AA¹⁷-LFI, HVTKPTXVPTKL:SPIS-AA¹⁷-LFI, YVPKPXXVPTKL:SPIS-AA¹⁷-LFI, TVPKPXXVPTQL:SPIS-AA¹⁷-LFI, AVPKAXXVPTKL:SPIS-AA¹⁷-LFI, KVGKAXXVPTKL:SPIS-AA¹⁷-LFI, KASKAXXVPTKL:SPIS-AA¹⁷-LFI, GSAGPXXVPTKM:SPIS-AA¹⁷-LFI, AAPASXXVPTRL:SPIS-AA¹⁷-LFI, HVPKPXXVPTKL:SPIS-AA¹⁷-LFI, RVPSTXXVPTKT:SPIS-AA¹⁷-LFI, ASAAPXXVPTAL:SPIS-AA¹⁷-LFI, ASASPXXVPTDL:SPIS-AA¹⁷-LFI, GIPEPXXVPEKM:SPIS-AA¹⁷-LFI, HVTKPTXAPTKL:SPIS-AA¹⁷-LFI, YVPKPXXAPTKL:SPIS-AA¹⁷-LFI, TVPKPXXAPTQL:SPIS-AA¹⁷-LFI, AVPKAXXAPTKL:SPIS-AA¹⁷-LFI, GSAGPXXTPTKM:SPIS-AA¹⁷-LFI, AAPASXXVPARL:SPIS-AA¹⁷-LFI, HVPKPXXAPTKL:SPIS-AA¹⁷-LFI, RVPSTXXAPVKT:SPIS-AA¹⁷-LFI, ASAAPXXVPQAL:SPIS-AA¹⁷-LFI, ASASPXXVSQDL:SPIS-AA¹⁷-LFI, ASASPXXVPQDL:SPIS-AA¹⁷-LFI, SSVKXQPSRVHH:SPIS-AA¹⁷-LFI, RNVQXRPTQVQL:SPIS-AA¹⁷-LFI, KIPKAXXAPVEL:KPLS-AA¹⁷-LYV, GIPEPXXAPVKM:KPLS-AA¹⁷-LYV, SIPKAXXAPVEL:KPLS-AA¹⁷-LYV, HVTKPTXAPVKL:KPLS-AA¹⁷-LYV, YVPKPXXAPVKL:KPLS-AA¹⁷-LYV, TVPKPXXAPVQL:KPLS-AA¹⁷-LYV, AVPKAXXAPVKL:KPLS-AA¹⁷-LYV, KVGKAXXAPVKL:KPLS-AA¹⁷-LYV, KASKAXXAPVKL:KPLS-AA¹⁷-LYV, GSAGPXXAPVKM:KPLS-AA¹⁷-LYV, AAPASXXAPVRL:KPLS-AA¹⁷-LYV, STPPTXXAPVRL:KPLS-AA¹⁷-LYV, HVPKPXXAPVKL:KPLS-AA¹⁷-LYV, ASAAPXXAPVAL:KPLS-AA¹⁷-LYV, ASASPXXAPVDL:KPLS-AA¹⁷-LYV, KIPKAXXVPTEL:KPLS-AA¹⁷-LYV, GIPEPXXVPEKM:KPLS-AA¹⁷-LYV, SIPKAXXVPTEL:KPLS-AA¹⁷-LYV, HVTKPTXAPTKL:KPLS-AA¹⁷-LYV, YVPKPXXAPTKL:KPLS-AA¹⁷-LYV, TVPKPXXAPTQL:KPLS-AA¹⁷-LYV, AVPKAXXAPTKL:KPLS-AA¹⁷-LYV, KVGKAXXVPTKL:KPLS-AA¹⁷-LYV, KASKAXXVPTKL:KPLS-AA¹⁷-LYV, GSAGPXXTPTKM:KPLS-AA¹⁷-LYV, AAPASXXVPARL:KPLS-AA¹⁷-LYV, STPPTXXVPTRL:KPLS-AA¹⁷-LYV, HVPKPXXAPTKL:KPLS-AA¹⁷-LYV, ASAAPXXVPQAL:KPLS-AA¹⁷-LYV, ASASPXXVSQDL:KPLS-AA¹⁷-LYV, ASASPXXVPQDL:KPLS-AA¹⁷-LYV, NDEGLEXVPTEE:KPLS-AA¹⁷-LYV, NDEGLEXVPTGQ:KPLS-AA¹⁷-LYV, SSVKXQPSRVHH:KPLS-AA¹⁷-LYV, RNVQXRPTQVQL:KPLS-AA¹⁷-LYV, KIPKAXXVPQEL:EPLP-AA¹⁷-VYY, GIPEPXXVPQKM:EPLP-AA¹⁷-VYY, SIPKAXXVPQEL:EPLP-AA¹⁷-VYY, HVTKPTXVPQKL:EPLP-AA¹⁷-VYY, YVPKPXXVPQKL:EPLP-AA¹⁷-VYY, TVPKPXXVPQQL:EPLP-AA¹⁷-VYY, AVPKAXXVPQKL:EPLP-AA¹⁷-VYY, KVGKAXXVPQKL:EPLP-AA¹⁷-VYY, KASKAXXVPQKL:EPLP-AA¹⁷-VYY, GSAGPXXVPQKM:EPLP-AA¹⁷-VYY, AAPASXXVPQRL:EPLP-AA¹⁷-VYY, STPPTXXVPQRL:EPLP-AA¹⁷-VYY, HVPKPXXVPQKL:EPLP-AA¹⁷-VYY, RVPSTXXVPQKT:EPLP-AA¹⁷-VYY, ASASPXXVPQDL:EPLP-AA¹⁷-VYY, KIPKAXXVPTEL:EPLP-AA¹⁷-VYY, GIPEPXXVPEKM:EPLP-AA¹⁷-VYY, SIPKAXXVPTEL:EPLP-AA¹⁷-VYY, HVTKPTXAPTKL:EPLP-AA¹⁷-VYY, YVPKPXXAPTKL:EPLP-AA¹⁷-VYY, TVPKPXXAPTQL:EPLP-AA¹⁷-VYY, AVPKAXXAPTKL:EPLP-AA¹⁷-VYY, KVGKAXXVPTKL:EPLP-AA¹⁷-VYY, KASKAXXVPTKL:EPLP-AA¹⁷-VYY, GSAGPXXTPTKM:EPLP-AA¹⁷-VYY, AAPASXXVPARL:EPLP-AA¹⁷-VYY, STPPTXXVPTRL:EPLP-AA¹⁷-VYY, HVPKPXXAPTKL:EPLP-AA¹⁷-VYY, RVPSTXXAPVKT:EPLP-AA¹⁷-VYY, ASASPXXVSQDL:EPLP-AA¹⁷-VYY, NDEGLEXVPTEE:EPLP-AA¹⁷-VYY, NDEGLEXVPTGQ:EPLP-AA¹⁷-VYY, SSVKXQPSRVHH:EPLP-AA¹⁷-VYY, RNVQXRPTQVQL:EPLP-AA¹⁷-VYY, KIPKAXXVSQEL:EPLT-AA¹⁷-LYY, GIPEPXXVSQKM:EPLT-AA¹⁷-LYY, SIPKAXXVSQEL:EPLT-AA¹⁷-LYY, HVTKPTXVSQKL:EPLT-AA¹⁷-LYY, YVPKPXXVSQKL:EPLT-AA¹⁷-LYY, TVPKPXXVSQQL:EPLT-AA¹⁷-LYY, AVPKAXXVSQKL:EPLT-AA¹⁷-LYY, KVGKAXXVSQKL:EPLT-AA¹⁷-LYY, KASKAXXVSQKL:EPLT-AA¹⁷-LYY, GSAGPXXVSQKM:EPLT-AA¹⁷-LYY, AAPASXXVSQRL:EPLT-AA¹⁷-LYY, STPPTXXVSQRL:EPLT-AA¹⁷-LYY, HVPKPXXVSQKL:EPLT-AA¹⁷-LYY, RVPSTXXVSQKT:EPLT-AA¹⁷-LYY, ASAAPXXVSQAL:EPLT-AA¹⁷-LYY, ASASPXXVSQDL:EPLT-AA¹⁷-LYY, KIPKAXXVPTEL:EPLT-AA¹⁷-LYY, GIPEPXXVPEKM:EPLT-AA¹⁷-LYY, SIPKAXXVPTEL:EPLT-AA¹⁷-LYY, HVTKPTXAPTKL:EPLT-AA¹⁷-LYY, YVPKPXXAPTKL:EPLT-AA¹⁷-LYY, TVPKPXXAPTQL:EPLT-AA¹⁷-LYY, AVPKAXXAPTKL:EPLT-AA¹⁷-LYY, KVGKAXXVPTKL:EPLT-AA¹⁷-LYY, KASKAXXVPTKL:EPLT-AA¹⁷-LYY, GSAGPXXTPTKM:EPLT-AA¹⁷-LYY, AAPASXXVPARL:EPLT-AA¹⁷-LYY, STPPTXXVPTRL:EPLT-AA¹⁷-LYY, HVPKPXXAPTKL:EPLT-AA¹⁷-LYY, RVPSTXXAPVKT:EPLT-AA¹⁷-LYY, ASAAPXXVPQAL:EPLT-AA¹⁷-LYY, NDEGLEXVPTEE:EPLT-AA¹⁷-LYY, NDEGLEXVPTGQ:EPLT-AA¹⁷-LYY, SSVKXQPSRVHH:EPLT-AA¹⁷-LYY, RNVQXRPTQVQL:EPLT-AA¹⁷-LYY, KIPKAXXVPQEL:EPLT-AA¹⁷-LYY, GIPEPXXVPQKM:EPLT-AA¹⁷-LYY, SIPKAXXVPQEL:EPLT-AA¹⁷-LYY, HVTKPTXVPQKL:EPLT-AA¹⁷-LYY, YVPKPXXVPQKL:EPLT-AA¹⁷-LYY, TVPKPXXVPQQL:EPLT-AA¹⁷-LYY, AVPKAXXVPQKL:EPLT-AA¹⁷-LYY, KVGKAXXVPQKL:EPLT-AA¹⁷-LYY, KASKAXXVPQKL:EPLT-AA¹⁷-LYY, GSAGPXXVPQKM:EPLT-AA¹⁷-LYY, AAPASXXVPQRL:EPLT-AA¹⁷-LYY, STPPTXXVPQRL:EPLT-AA¹⁷-LYY, HVPKPXXVPQKL:EPLT-AA¹⁷-LYY, RVPSTXXVPQKT:EPLT-AA¹⁷-LYY, ASASPXXVPQDL:EPLT-AA¹⁷-LYY, NDEGLEXVPTGQ:SNIT-AA¹⁷-QIM, GIPEPXXVPEKM:SNIT-AA¹⁷-QIM, HVTKPTXAPTKL:SNIT-AA¹⁷-QIM, YVPKPXXAPTKL:SNIT-AA¹⁷-QIM, TVPKPXXAPTQL:SNIT-AA¹⁷-QIM, AVPKAXXAPTKL:SNIT-AA¹⁷-QIM, GSAGPXXTPTKM:SNIT-AA¹⁷-QIM, AAPASXXVPARL:SNIT-AA¹⁷-QIM, HVPKPXXAPTKL:SNIT-AA¹⁷-QIM, RVPSTXXAPVKT:SNIT-AA¹⁷-QIM, ASAAPXXVPQAL:SNIT-AA¹⁷-QIM, ASASPXXVSQDL:SNIT-AA¹⁷-QIM, ASASPXXVPQDL:SNIT-AA¹⁷-QIM, SSVKXQPSRVHH:SNIT-AA¹⁷-QIM, RNVQXRPTQVQL:SNIT-AA¹⁷-QIM, RNVQXRPSRVQL:RSVK-AA¹⁷-AKV, KIPKAXXVPTEL:RSVK-AA¹⁷-AKV, GIPEPXXVPEKM:RSVK-AA¹⁷-AKV, SIPKAXXVPTEL:RSVK-AA¹⁷-AKV, HVTKPTXAPTKL:RSVK-AA¹⁷-AKV, YVPKPXXAPTKL:RSVK-AA¹⁷-AKV, TVPKPXXAPTQL:RSVK-AA¹⁷-AKV, AVPKAXXAPTKL:RSVK-AA¹⁷-AKV, KVGKAXXVPTKL:RSVK-AA¹⁷-AKV, KASKAXXVPTKL:RSVK-AA¹⁷-AKV, GSAGPXXTPTKM:RSVK-AA¹⁷-AKV, AAPASXXVPARL:RSVK-AA¹⁷-AKV, STPPTXXVPTRL:RSVK-AA¹⁷-AKV, HVPKPXXAPTKL:RSVK-AA¹⁷-AKV, RVPSTXXAPVKT:RSVK-AA¹⁷-AKV, ASAAPXXVPQAL:RSVK-AA¹⁷-AKV, ASASPXXVSQDL:RSVK-AA¹⁷-AKV, ASASPXXVPQDL:RSVK-AA¹⁷-AKV, NDEGLEXVPTEE:RSVK-AA¹⁷-AKV, NDEGLEXVPTGQ:RSVK-AA¹⁷-AKV, RNVQXRPTQVQL:RSVK-AA¹⁷-AKV, SSVKXQPTQVHH:RPVQ-AA¹⁷-RKI, KIPKAXXVPTEL:RPVQ-AA¹⁷-RKI, GIPEPXXVPEKM:RPVQ-AA¹⁷-RKI, SIPKAXXVPTEL:RPVQ-AA¹⁷-RKI, HVTKPTXAPTKL:RPVQ-AA¹⁷-RKI, YVPKPXXAPTKL:RPVQ-AA¹⁷-RKI, TVPKPXXAPTQL:RPVQ-AA¹⁷-RKI, AVPKAXXAPTKL:RPVQ-AA¹⁷-RKI, KVGKAXXVPTKL:RPVQ-AA¹⁷-RKI, KASKAXXVPTKL:RPVQ-AA¹⁷-RKI, GSAGPXXTPTKM:RPVQ-AA¹⁷-RKI, AAPASXXVPARL:RPVQ-AA¹⁷-RKI, STPPTXXVPTRL:RPVQ-AA¹⁷-RKI, HVPKPXXAPTKL:RPVQ-AA¹⁷-RKI, RVPSTXXAPVKT:RPVQ-AA¹⁷-RKI, ASAAPXXVPQAL:RPVQ-AA¹⁷-RKI, ASASPXXVSQDL:RPVQ-AA¹⁷-RKI, ASASPXXVPQDL:RPVQ-AA¹⁷-RKI, NDEGLEXVPTEE:RPVQ-AA¹⁷-RKI, NDEGLEXVPTGQ:RPVQ-AA¹⁷-RKI and SSVKXQPSRVHH:RPVQ-AA¹⁷-RKI; and wherein AA¹⁷ is selected from the group consisting of G, A, V, L, I, P, F, M, W, T and S (in particular is selected from the group consisting of M, I, L, V and T).

[0270] In certain embodiments, the triplet PEP7:PEP3:PEP1 is selected from the group consisting of GIPEPXX:VPT:SAIS, HVTKPTX:VPT:SAIS, YVPKPXX:VPT:SAIS, TVPKPXX:VPT:SAIS, AVPKAXX:VPT:SAIS, KVGKAXX:VPT:SAIS, KASKAXX:VPT:SAIS, GSAGPXX:VPT:SAIS, AAPASXX:VPT:SAIS, STPPTXX:VPT:SAIS, HVPKPXX:VPT:SAIS, RVPSTXX:VPT:SAIS, ASAAPXX:VPT:SAIS, ASASPXX:VPT:SAIS, GIPEPXX:VPE:SAIS, HVTKPTX:APT:SAIS, YVPKPXX:APT:SAIS, TVPKPXX:APT:SAIS, AVPKAXX:APT:SAIS, GSAGPXX:TPT:SAIS, AAPASXX:VPA:SAIS, HVPKPXX:APT:SAIS, RVPSTXX:APV:SAIS, ASAAPXX:VPQ:SAIS, ASASPXX:VSQ:SAIS, ASASPXX:VPQ:SAIS, SSVKXQP:SRV:SAIS, RNVQXRP:TQV:SAIS, KIPKAXX:VPE:SSLS, SIPKAXX:VPE:SSLS, HVTKPTX:VPE:SSLS, YVPKPXX:VPE:SSLS, TVPKPXX:VPE:SSLS, AVPKAXX:VPE:SSLS, KVGKAXX:VPE:SSLS, KASKAXX:VPE:SSLS, GSAGPXX:VPE:SSLS, AAPASXX:VPE:SSLS, STPPTXX:VPE:SSLS, HVPKPXX:VPE:SSLS, RVPSTXX:VPE:SSLS, ASAAPXX:VPE:SSLS, ASASPXX:VPE:SSLS, KIPKAXX:VPT:SSLS, SIPKAXX:VPT:SSLS, HVTKPTX:APT:SSLS, YVPKPXX:APT:SSLS, TVPKPXX:APT:SSLS, AVPKAXX:APT:SSLS, KVGKAXX:VPT:SSLS, KASKAXX:VPT:SSLS, GSAGPXX:TPT:SSLS, AAPASXX:VPA:SSLS, STPPTXX:VPT:SSLS, HVPKPXX:APT:SSLS, RVPSTXX:APV:SSLS, ASAAPXX:VPQ:SSLS, ASASPXX:VSQ:SSLS, ASASPXX:VPQ:SSLS, NDEGLEX:VPT:SSLS, SSVKXQP:SRV:SSLS, RNVQXRP:TQV:SSLS, KIPKAXX:APT:NAIS, GIPEPXX:APT:NAIS, SIPKAXX:APT:NAIS, AVPKAXX:APT:NAIS, KVGKAXX:APT:NAIS, KASKAXX:APT:NAIS, GSAGPXX:APT:NAIS, AAPASXX:APT:NAIS, STPPTXX:APT:NAIS, RVPSTXX:APT:NAIS, ASAAPXX:APT:NAIS, ASASPXX:APT:NAIS, KIPKAXX:VPT:NAIS, GIPEPXX:VPE:NAIS, SIPKAXX:VPT:NAIS, KVGKAXX:VPT:NAIS, KASKAXX:VPT:NAIS, GSAGPXX:TPT:NAIS, AAPASXX:VPA:NAIS, STPPTXX:VPT:NAIS, RVPSTXX:APV:NAIS, ASAAPXX:VPQ:NAIS, ASASPXX:VSQ:NAIS, ASASPXX:VPQ:NAIS, NDEGLEX:VPT:NAIS, SSVKXQP:SRV:NAIS, RNVQXRP:TQV:NAIS, KIPKAXX:APT:SATS, GIPEPXX:APT:SATS, SIPKAXX:APT:SATS, HVTKPTX:APT:SATS, YVPKPXX:APT:SATS, TVPKPXX:APT:SATS, KVGKAXX:APT:SATS, KASKAXX:APT:SATS, GSAGPXX:APT:SATS, AAPASXX:APT:SATS, STPPTXX:APT:SATS, HVPKPXX:APT:SATS, RVPSTXX:APT:SATS, ASAAPXX:APT:SATS, ASASPXX:APT:SATS, KIPKAXX:VPT:SATS, GIPEPXX:VPE:SATS, SIPKAXX:VPT:SATS, KVGKAXX:VPT:SATS, KASKAXX:VPT:SATS, GSAGPXX:TPT:SATS, AAPASXX:VPA:SATS, STPPTXX:VPT:SATS, RVPSTXX:APV:SATS, ASAAPXX:VPQ:SATS, ASASPXX:VSQ:SATS, ASASPXX:VPQ:SATS, NDEGLEX:VPT:SATS, SSVKXQP:SRV:SATS, RNVQXRP:TQV:SATS, KIPKAXX:VPT:SPIS, GIPEPXX:VPT:SPIS, SIPKAXX:VPT:SPIS, HVTKPTX:VPT:SPIS, YVPKPXX:VPT:SPIS, TVPKPXX:VPT:SPIS, AVPKAXX:VPT:SPIS, KASKAXX:VPT:SPIS, GSAGPXX:VPT:SPIS, AAPASXX:VPT:SPIS, STPPTXX:VPT:SPIS, HVPKPXX:VPT:SPIS, RVPSTXX:VPT:SPIS, ASAAPXX:VPT:SPIS, ASASPXX:VPT:SPIS, GIPEPXX:VPE:SPIS, HVTKPTX:APT:SPIS, YVPKPXX:APT:SPIS, TVPKPXX:APT:SPIS, AVPKAXX:APT:SPIS, GSAGPXX:TPT:SPIS, AAPASXX:VPA:SPIS, HVPKPXX:APT:SPIS, RVPSTXX:APV:SPIS, ASAAPXX:VPQ:SPIS, ASASPXX:VSQ:SPIS, ASASPXX:VPQ:SPIS, SSVKXQP:SRV:SPIS, RNVQXRP:TQV:SPIS, KIPKAXX:VPT:EPIS, GIPEPXX:VPT:EPIS, SIPKAXX:VPT:EPIS, HVTKPTX:VPT:EPIS, YVPKPXX:VPT:EPIS, TVPKPXX:VPT:EPIS, AVPKAXX:VPT:EPIS, KVGKAXX:VPT:EPIS, GSAGPXX:VPT:EPIS, AAPASXX:VPT:EPIS, STPPTXX:VPT:EPIS, HVPKPXX:VPT:EPIS, RVPSTXX:VPT:EPIS, ASAAPXX:VPT:EPIS, ASASPXX:VPT:EPIS, GIPEPXX:VPE:EPIS, HVTKPTX:APT:EPIS, YVPKPXX:APT:EPIS, TVPKPXX:APT:EPIS, AVPKAXX:APT:EPIS, GSAGPXX:TPT:EPIS, AAPASXX:VPA:EPIS, HVPKPXX:APT:EPIS, RVPSTXX:APV:EPIS, ASAAPXX:VPQ:EPIS, ASASPXX:VSQ:EPIS, ASASPXX:VPQ:EPIS, SSVKXQP:SRV:EPIS, RNVQXRP:TQV:EPIS, KIPKAXX:TPT:SPIN, GIPEPXX:TPT:SPIN, SIPKAXX:TPT:SPIN, HVTKPTX:TPT:SPIN, YVPKPXX:TPT:SPIN, TVPKPXX:TPT:SPIN, AVPKAXX:TPT:SPIN, KVGKAXX:TPT:SPIN, KASKAXX:TPT:SPIN, AAPASXX:TPT:SPIN, STPPTXX:TPT:SPIN, HVPKPXX:TPT:SPIN, RVPSTXX:TPT:SPIN, ASAAPXX:TPT:SPIN, ASASPXX:TPT:SPIN, KIPKAXX:VPT:SPIN, GIPEPXX:VPE:SPIN, SIPKAXX:VPT:SPIN, HVTKPTX:APT:SPIN, YVPKPXX:APT:SPIN, TVPKPXX:APT:SPIN, AVPKAXX:APT:SPIN, KVGKAXX:VPT:SPIN, KASKAXX:VPT:SPIN, AAPASXX:VPA:SPIN, STPPTXX:VPT:SPIN, HVPKPXX:APT:SPIN, RVPSTXX:APV:SPIN, ASAAPXX:VPQ:SPIN, ASASPXX:VSQ:SPIN, ASASPXX:VPQ:SPIN, NDEGLEX:VPT:SPIN, SSVKXQP:SRV:SPIN, RNVQXRP:TQV:SPIN, KIPKAXX:VPA:SPIS, GIPEPXX:VPA:SPIS, SIPKAXX:VPA:SPIS, HVTKPTX:VPA:SPIS, YVPKPXX:VPA:SPIS, TVPKPXX:VPA:SPIS, AVPKAXX:VPA:SPIS, KVGKAXX:VPA:SPIS, KASKAXX:VPA:SPIS, GSAGPXX:VPA:SPIS, STPPTXX:VPA:SPIS, HVPKPXX:VPA:SPIS, RVPSTXX:VPA:SPIS, ASAAPXX:VPA:SPIS, ASASPXX:VPA:SPIS, KVGKAXX:VPT:SPIS, NDEGLEX:VPT:SPIS, KIPKAXX:APV:KPLS, GIPEPXX:APV:KPLS, SIPKAXX:APV:KPLS, HVTKPTX:APV:KPLS, YVPKPXX:APV:KPLS, TVPKPXX:APV:KPLS, AVPKAXX:APV:KPLS, KVGKAXX:APV:KPLS, KASKAXX:APV:KPLS, GSAGPXX:APV:KPLS, AAPASXX:APV:KPLS, STPPTXX:APV:KPLS, HVPKPXX:APV:KPLS, ASAAPXX:APV:KPLS, ASASPXX:APV:KPLS, KIPKAXX:VPT:KPLS, GIPEPXX:VPE:KPLS, SIPKAXX:VPT:KPLS, HVTKPTX:APT:KPLS, YVPKPXX:APT:KPLS, TVPKPXX:APT:KPLS, AVPKAXX:APT:KPLS, KVGKAXX:VPT:KPLS, KASKAXX:VPT:KPLS, GSAGPXX:TPT:KPLS, AAPASXX:VPA:KPLS, STPPTXX:VPT:KPLS, HVPKPXX:APT:KPLS, ASAAPXX:VPQ:KPLS, ASASPXX:VSQ:KPLS, ASASPXX:VPQ:KPLS, NDEGLEX:VPT:KPLS, SSVKXQP:SRV:KPLS, RNVQXRP:TQV:KPLS, KIPKAXX:VPQ:EPLP, GIPEPXX:VPQ:EPLP, SIPKAXX:VPQ:EPLP, HVTKPTX:VPQ:EPLP, YVPKPXX:VPQ:EPLP, TVPKPXX:VPQ:EPLP, AVPKAXX:VPQ:EPLP, KVGKAXX:VPQ:EPLP, KASKAXX:VPQ:EPLP, GSAGPXX:VPQ:EPLP, AAPASXX:VPQ:EPLP, STPPTXX:VPQ:EPLP, HVPKPXX:VPQ:EPLP, RVPSTXX:VPQ:EPLP, ASASPXX:VPQ:EPLP, KIPKAXX:VPT:EPLP, GIPEPXX:VPE:EPLP, SIPKAXX:VPT:EPLP, HVTKPTX:APT:EPLP, YVPKPXX:APT:EPLP, TVPKPXX:APT:EPLP, AVPKAXX:APT:EPLP, KVGKAXX:VPT:EPLP, KASKAXX:VPT:EPLP, GSAGPXX:TPT:EPLP, AAPASXX:VPA:EPLP, STPPTXX:VPT:EPLP, HVPKPXX:APT:EPLP, RVPSTXX:APV:EPLP, ASASPXX:VSQ:EPLP, NDEGLEX:VPT:EPLP, SSVKXQP:SRV:EPLP, RNVQXRP:TQV:EPLP, KIPKAXX:VSQ:EPLT, GIPEPXX:VSQ:EPLT, SIPKAXX:VSQ:EPLT, HVTKPTX:VSQ:EPLT, YVPKPXX:VSQ:EPLT, TVPKPXX:VSQ:EPLT, AVPKAXX:VSQ:EPLT, KVGKAXX:VSQ:EPLT, KASKAXX:VSQ:EPLT, GSAGPXX:VSQ:EPLT, AAPASXX:VSQ:EPLT, STPPTXX:VSQ:EPLT, HVPKPXX:VSQ:EPLT, RVPSTXX:VSQ:EPLT, ASAAPXX:VSQ:EPLT, ASASPXX:VSQ:EPLT, KIPKAXX:VPT:EPLT, GIPEPXX:VPE:EPLT, SIPKAXX:VPT:EPLT, HVTKPTX:APT:EPLT, YVPKPXX:APT:EPLT, TVPKPXX:APT:EPLT, AVPKAXX:APT:EPLT, KVGKAXX:VPT:EPLT, KASKAXX:VPT:EPLT, GSAGPXX:TPT:EPLT, AAPASXX:VPA:EPLT, STPPTXX:VPT:EPLT, HVPKPXX:APT:EPLT, RVPSTXX:APV:EPLT, ASAAPXX:VPQ:EPLT, NDEGLEX:VPT:EPLT, SSVKXQP:SRV:EPLT, RNVQXRP:TQV:EPLT, KIPKAXX:VPQ:EPLT, GIPEPXX:VPQ:EPLT, SIPKAXX:VPQ:EPLT, HVTKPTX:VPQ:EPLT, YVPKPXX:VPQ:EPLT, TVPKPXX:VPQ:EPLT, AVPKAXX:VPQ:EPLT, KVGKAXX:VPQ:EPLT, KASKAXX:VPQ:EPLT, GSAGPXX:VPQ:EPLT, AAPASXX:VPQ:EPLT, STPPTXX:VPQ:EPLT, HVPKPXX:VPQ:EPLT, RVPSTXX:VPQ:EPLT, ASASPXX:VPQ:EPLT, NDEGLEX:VPT:SNIT, GIPEPXX:VPE:SNIT, HVTKPTX:APT:SNIT, YVPKPXX:APT:SNIT, TVPKPXX:APT:SNIT, AVPKAXX:APT:SNIT, GSAGPXX:TPT:SNIT, AAPASXX:VPA:SNIT, HVPKPXX:APT:SNIT, RVPSTXX:APV:SNIT, ASAAPXX:VPQ:SNIT, ASASPXX:VSQ:SNIT, ASASPXX:VPQ:SNIT, SSVKXQP:SRV:SNIT, RNVQXRP:TQV:SNIT, RNVQXRP:SRV:RSVK, KIPKAXX:VPT:RSVK, GIPEPXX:VPE:RSVK, SIPKAXX:VPT:RSVK, HVTKPTX:APT:RSVK, YVPKPXX:APT:RSVK, TVPKPXX:APT:RSVK, AVPKAXX:APT:RSVK, KVGKAXX:VPT:RSVK, KASKAXX:VPT:RSVK, GSAGPXX:TPT:RSVK, AAPASXX:VPA:RSVK, STPPTXX:VPT:RSVK, HVPKPXX:APT:RSVK, RVPSTXX:APV:RSVK, ASAAPXX:VPQ:RSVK, ASASPXX:VSQ:RSVK, ASASPXX:VPQ:RSVK, NDEGLEX:VPT:RSVK, RNVQXRP:TQV:RSVK, SSVKXQP:TQV:RPVQ, KIPKAXX:VPT:RPVQ, GIPEPXX:VPE:RPVQ, SIPKAXX:VPT:RPVQ, HVTKPTX:APT:RPVQ, YVPKPXX:APT:RPVQ, TVPKPXX:APT:RPVQ, AVPKAXX:APT:RPVQ, KVGKAXX:VPT:RPVQ, KASKAXX:VPT:RPVQ, GSAGPXX:TPT:RPVQ, AAPASXX:VPA:RPVQ, STPPTXX:VPT:RPVQ, HVPKPXX:APT:RPVQ, RVPSTXX:APV:RPVQ, ASAAPXX:VPQ:RPVQ, ASASPXX:VSQ:RPVQ, ASASPXX:VPQ:RPVQ, NDEGLEX:VPT:RPVQ and SSVKXQP:SRV:RPVQ.

[0271] In certain embodiments, the triplet PEP7:PEP3:PEP12 is selected from the group consisting of GIPEPXX:VPT:SAIS-AA¹⁷-LYL, HVTKPTX:VPT:SAIS-AA¹⁷-LYL, YVPKPXX:VPT:SAIS-AA¹⁷-LYL, TVPKPXX:VPT:SAIS-AA¹⁷-LYL, AVPKAXX:VPT:SAIS-AA¹⁷-LYL, KVGKAXX:VPT:SAIS-AA¹⁷-LYL, KASKAXX:VPT:SAIS-AA¹⁷-LYL, GSAGPXX:VPT:SAIS-AA¹⁷-LYL, AAPASXX:VPT:SAIS-AA¹⁷-LYL, STPPTXX:VPT:SAIS-AA¹⁷-LYL, HVPKPXX:VPT:SAIS-AA¹⁷-LYL, RVPSTXX:VPT:SAIS-AA¹⁷-LYL, ASAAPXX:VPT:SAIS-AA¹⁷-LYL, ASASPXX:VPT:SAIS-AA¹⁷-LYL, GIPEPXX:VPE:SAIS-AA¹⁷-LYL, HVTKPTX:APT:SAIS-AA¹⁷-LYL, YVPKPXX:APT:SAIS-AA¹⁷-LYL, TVPKPXX:APT:SAIS-AA¹⁷-LYL, AVPKAXX:APT:SAIS-AA¹⁷-LYL, GSAGPXX:TPT:SAIS-AA¹⁷-LYL, AAPASXX:VPA:SAIS-AA¹⁷-LYL, HVPKPXX:APT:SAIS-AA¹⁷-LYL, RVPSTXX:APV:SAIS-AA¹⁷-LYL, ASAAPXX:VPQ:SAIS-AA¹⁷-LYL, ASASPXX:VSQ:SAIS-AA¹⁷-LYL, ASASPXX:VPQ:SAIS-AA¹⁷-LYL, SSVKXQP:SRV:SAIS-AA¹⁷-LYL, RNVQXRP:TQV:SAIS-AA¹⁷-LYL, KIPKAXX:VPE:SSLS-AA¹⁷-LFF, SIPKAXX:VPE:SSLS-AA¹⁷-LFF, HVTKPTX:VPE:SSLS-AA¹⁷-LFF, YVPKPXX:VPE:SSLS-AA¹⁷-LFF, TVPKPXX:VPE:SSLS-AA¹⁷-LFF, AVPKAXX:VPE:SSLS-AA¹⁷-LFF, KVGKAXX:VPE:SSLS-AA¹⁷-LFF, KASKAXX:VPE:SSLS-AA¹⁷-LFF, GSAGPXX:VPE:SSLS-AA¹⁷-LFF, AAPASXX:VPE:SSLS-AA¹⁷-LFF, STPPTXX:VPE:SSLS-AA¹⁷-LFF, HVPKPXX:VPE:SSLS-AA¹⁷-LFF, RVPSTXX:VPE:SSLS-AA¹⁷-LFF, ASAAPXX:VPE:SSLS-AA¹⁷-LFF, ASASPXX:VPE:SSLS-AA¹⁷-LFF, KIPKAXX:VPT:SSLS-AA¹⁷-LFF, SIPKAXX:VPT:SSLS-AA¹⁷-LFF, HVTKPTX:APT:SSLS-AA¹⁷-LFF, YVPKPXX:APT:SSLS-AA¹⁷-LFF, TVPKPXX:APT:SSLS-AA¹⁷-LFF, AVPKAXX:APT:SSLS-AA¹⁷-LFF, KVGKAXX:VPT:SSLS-AA¹⁷-LFF, KASKAXX:VPT:SSLS-AA¹⁷-LFF, GSAGPXX:TPT:SSLS-AA¹⁷-LFF, AAPASXX:VPA:SSLS-AA¹⁷-LFF, STPPTXX:VPT:SSLS-AA¹⁷-LFF, HVPKPXX:APT:SSLS-AA¹⁷-LFF, RVPSTXX:APV:SSLS-AA¹⁷-LFF, ASAAPXX:VPQ:SSLS-AA¹⁷-LFF, ASASPXX:VSQ:SSLS-AA¹⁷-LFF, ASASPXX:VPQ:SSLS-AA¹⁷-LFF, NDEGLEX:VPT:SSLS-AA¹⁷-LFF, SSVKXQP:SRV:SSLS-AA¹⁷-LFF, RNVQXRP:TQV:SSLS-AA¹⁷-LFF, KIPKAXX:APT:NAIS-AA¹⁷-LYF, GIPEPXX:APT:NAIS-AA¹⁷-LYF, SIPKAXX:APT:NAIS-AA¹⁷-LYF, AVPKAXX:APT:NAIS-AA¹⁷-LYF, KVGKAXX:APT:NAIS-AA¹⁷-LYF, KASKAXX:APT:NAIS-AA¹⁷-LYF, GSAGPXX:APT:NAIS-AA¹⁷-LYF, AAPASXX:APT:NAIS-AA¹⁷-LYF, STPPTXX:APT:NAIS-AA¹⁷-LYF, RVPSTXX:APT:NAIS-AA¹⁷-LYF, ASAAPXX:APT:NAIS-AA¹⁷-LYF, ASASPXX:APT:NAIS-AA¹⁷-LYF, KIPKAXX:VPT:NAIS-AA¹⁷-LYF, GIPEPXX:VPE:NAIS-AA¹⁷-LYF, SIPKAXX:VPT:NAIS-AA¹⁷-LYF, KVGKAXX:VPT:NAIS-AA¹⁷-LYF, KASKAXX:VPT:NAIS-AA¹⁷-LYF, GSAGPXX:TPT:NAIS-AA¹⁷-LYF, AAPASXX:VPA:NAIS-AA¹⁷-LYF, STPPTXX:VPT:NAIS-AA¹⁷-LYF, RVPSTXX:APV:NAIS-AA¹⁷-LYF, ASAAPXX:VPQ:NAIS-AA¹⁷-LYF, ASASPXX:VSQ:NAIS-AA¹⁷-LYF, ASASPXX:VPQ:NAIS-AA¹⁷-LYF, NDEGLEX:VPT:NAIS-AA¹⁷-LYF, SSVKXQP:SRV:NAIS-AA¹⁷-LYF, RNVQXRP:TQV:NAIS-AA¹⁷-LYF, KIPKAXX:APT:SATS-AA¹⁷-LYY, GIPEPXX:APT:SATS-AA¹⁷-LYY, SIPKAXX:APT:SATS-AA¹⁷-LYY, HVTKPTX:APT:SATS-AA¹⁷-LYY, YVPKPXX:APT:SATS-AA¹⁷-LYY, TVPKPXX:APT:SATS-AA¹⁷-LYY, KVGKAXX:APT:SATS-AA¹⁷-LYY, KASKAXX:APT:SATS-AA¹⁷-LYY, GSAGPXX:APT:SATS-AA¹⁷-LYY, AAPASXX:APT:SATS-AA¹⁷-LYY, STPPTXX:APT:SATS-AA¹⁷-LYY, HVPKPXX:APT:SATS-AA¹⁷-LYY, RVPSTXX:APT:SATS-AA¹⁷-LYY, ASAAPXX:APT:SATS-AA¹⁷-LYY, ASASPXX:APT:SATS-AA¹⁷-LYY, KIPKAXX:VPT:SATS-AA¹⁷-LYY, GIPEPXX:VPE:SATS-AA¹⁷-LYY, SIPKAXX:VPT:SATS-AA¹⁷-LYY, KVGKAXX:VPT:SATS-AA¹⁷-LYY, KASKAXX:VPT:SATS-AA¹⁷-LYY, GSAGPXX:TPT:SATS-AA¹⁷-LYY, AAPASXX:VPA:SATS-AA¹⁷-LYY, STPPTXX:VPT:SATS-AA¹⁷-LYY, RVPSTXX:APV:SATS-AA¹⁷-LYY, ASAAPXX:VPQ:SATS-AA¹⁷-LYY, ASASPXX:VSQ:SATS-AA¹⁷-LYY, ASASPXX:VPQ:SATS-AA¹⁷-LYY, NDEGLEX:VPT:SATS-AA¹⁷-LYY, SSVKXQP:SRV:SATS-AA¹⁷-LYY, RNVQXRP:TQV:SATS-AA¹⁷-LYY, KIPKAXX:VPT:SPIS-AA¹⁷-LYK, GIPEPXX:VPT:SPIS-AA¹⁷-LYK, SIPKAXX:VPT:SPIS-AA¹⁷-LYK, HVTKPTX:VPT:SPIS-AA¹⁷-LYK, YVPKPXX:VPT:SPIS-AA¹⁷-LYK, TVPKPXX:VPT:SPIS-AA¹⁷-LYK, AVPKAXX:VPT:SPIS-AA¹⁷-LYK, KASKAXX:VPT:SPIS-AA¹⁷-LYK, GSAGPXX:VPT:SPIS-AA¹⁷-LYK, AAPASXX:VPT:SPIS-AA¹⁷-LYK, STPPTXX:VPT:SPIS-AA¹⁷-LYK, HVPKPXX:VPT:SPIS-AA¹⁷-LYK, RVPSTXX:VPT:SPIS-AA¹⁷-LYK, ASAAPXX:VPT:SPIS-AA¹⁷-LYK, ASASPXX:VPT:SPIS-AA¹⁷-LYK, GIPEPXX:VPE:SPIS-AA¹⁷-LYK, HVTKPTX:APT:SPIS-AA¹⁷-LYK, YVPKPXX:APT:SPIS-AA¹⁷-LYK, TVPKPXX:APT:SPIS-AA¹⁷-LYK, AVPKAXX:APT:SPIS-AA¹⁷-LYK, GSAGPXX:TPT:SPIS-AA¹⁷-LYK, AAPASXX:VPA:SPIS-AA¹⁷-LYK, HVPKPXX:APT:SPIS-AA¹⁷-LYK, RVPSTXX:APV:SPIS-AA¹⁷-LYK, ASAAPXX:VPQ:SPIS-AA¹⁷-LYK, ASASPXX:VSQ:SPIS-AA¹⁷-LYK, ASASPXX:VPQ:SPIS-AA¹⁷-LYK, SSVKXQP:SRV:SPIS-AA¹⁷-LYK, RNVQXRP:TQV:SPIS-AA¹⁷-LYK, KIPKAXX:VPT:EPIS-AA¹⁷-LYL, GIPEPXX:VPT:EPIS-AA¹⁷-LYL, SIPKAXX:VPT:EPIS-AA¹⁷-LYL, HVTKPTX:VPT:EPIS-AA¹⁷-LYL, YVPKPXX:VPT:EPIS-AA¹⁷-LYL, TVPKPXX:VPT:EPIS-AA¹⁷-LYL, AVPKAXX:VPT:EPIS-AA¹⁷-LYL, KVGKAXX:VPT:EPIS-AA¹⁷-LYL, GSAGPXX:VPT:EPIS-AA¹⁷-LYL, AAPASXX:VPT:EPIS-AA¹⁷-LYL, STPPTXX:VPT:EPIS-AA¹⁷-LYL, HVPKPXX:VPT:EPIS-AA¹⁷-LYL, RVPSTXX:VPT:EPIS-AA¹⁷-LYL, ASAAPXX:VPT:EPIS-AA¹⁷-LYL, ASASPXX:VPT:EPIS-AA¹⁷-LYL, GIPEPXX:VPE:EPIS-AA¹⁷-LYL, HVTKPTX:APT:EPIS-AA¹⁷-LYL, YVPKPXX:APT:EPIS-AA¹⁷-LYL, TVPKPXX:APT:EPIS-AA¹⁷-LYL, AVPKAXX:APT:EPIS-AA¹⁷-LYL, GSAGPXX:TPT:EPIS-AA¹⁷-LYL, AAPASXX:VPA:EPIS-AA¹⁷-LYL, HVPKPXX:APT:EPIS-AA¹⁷-LYL, RVPSTXX:APV:EPIS-AA¹⁷-LYL, ASAAPXX:VPQ:EPIS-AA¹⁷-LYL, ASASPXX:VSQ:EPIS-AA¹⁷-LYL, ASASPXX:VPQ:EPIS-AA¹⁷-LYL, SSVKXQP:SRV:EPIS-AA¹⁷-LYL, RNVQXRP:TQV:EPIS-AA¹⁷-LYL, KIPKAXX:TPT:SPIN-AA¹⁷-LYF, GIPEPXX:TPT:SPIN-AA¹⁷-LYF, SIPKAXX:TPT:SPIN-AA¹⁷-LYF, HVTKPTX:TPT:SPIN-AA¹⁷-LYF, YVPKPXX:TPT:SPIN-AA¹⁷-LYF, TVPKPXX:TPT:SPIN-AA¹⁷-LYF, AVPKAXX:TPT:SPIN-AA¹⁷-LYF, KVGKAXX:TPT:SPIN-AA¹⁷-LYF, KASKAXX:TPT:SPIN-AA¹⁷-LYF, AAPASXX:TPT:SPIN-AA¹⁷-LYF, STPPTXX:TPT:SPIN-AA¹⁷-LYF, HVPKPXX:TPT:SPIN-AA¹⁷-LYF, RVPSTXX:TPT:SPIN-AA¹⁷-LYF, ASAAPXX:TPT:SPIN-AA¹⁷-LYF, ASASPXX:TPT:SPIN-AA¹⁷-LYF, KIPKAXX:VPT:SPIN-AA¹⁷-LYF, GIPEPXX:VPE:SPIN-AA¹⁷-LYF, SIPKAXX:VPT:SPIN-AA¹⁷-LYF, HVTKPTX:APT:SPIN-AA¹⁷-LYF, YVPKPXX:APT:SPIN-AA¹⁷-LYF, TVPKPXX:APT:SPIN-AA¹⁷-LYF, AVPKAXX:APT:SPIN-AA¹⁷-LYF, KVGKAXX:VPT:SPIN-AA¹⁷-LYF, KASKAXX:VPT:SPIN-AA¹⁷-LYF, AAPASXX:VPA:SPIN-AA¹⁷-LYF, STPPTXX:VPT:SPIN-AA¹⁷-LYF, HVPKPXX:APT:SPIN-AA¹⁷-LYF, RVPSTXX:APV:SPIN-AA¹⁷-LYF, ASAAPXX:VPQ:SPIN-AA¹⁷-LYF, ASASPXX:VSQ:SPIN-AA¹⁷-LYF, ASASPXX:VPQ:SPIN-AA¹⁷-LYF, NDEGLEX:VPT:SPIN-AA¹⁷-LYF, SSVKXQP:SRV:SPIN-AA¹⁷-LYF, RNVQXRP:TQV:SPIN-AA¹⁷-LYF, KIPKAXX:VPA:SPIS-AA¹⁷-LYI, GIPEPXX:VPA:SPIS-AA¹⁷-LYI, SIPKAXX:VPA:SPIS-AA¹⁷-LYI, HVTKPTX:VPA:SPIS-AA¹⁷-LYI, YVPKPXX:VPA:SPIS-AA¹⁷-LYI, TVPKPXX:VPA:SPIS-AA¹⁷-LYI, AVPKAXX:VPA:SPIS-AA¹⁷-LYI, KVGKAXX:VPA:SPIS-AA¹⁷-LYI, KASKAXX:VPA:SPIS-AA¹⁷-LYI, GSAGPXX:VPA:SPIS-AA¹⁷-LYI, STPPTXX:VPA:SPIS-AA¹⁷-LYI, HVPKPXX:VPA:SPIS-AA¹⁷-LYI, RVPSTXX:VPA:SPIS-AA¹⁷-LYI, ASAAPXX:VPA:SPIS-AA¹⁷-LYI, ASASPXX:VPA:SPIS-AA¹⁷-LYI, KIPKAXX:VPT:SPIS-AA¹⁷-LYI, GIPEPXX:VPE:SPIS-AA¹⁷-LYI, SIPKAXX:VPT:SPIS-AA¹⁷-LYI, HVTKPTX:APT:SPIS-AA¹⁷-LYI, YVPKPXX:APT:SPIS-AA¹⁷-LYI, TVPKPXX:APT:SPIS-AA¹⁷-LYI, AVPKAXX:APT:SPIS-AA¹⁷-LYI, KVGKAXX:VPT:SPIS-AA¹⁷-LYI, KASKAXX:VPT:SPIS-AA¹⁷-LYI, GSAGPXX:TPT:SPIS-AA¹⁷-LYI, STPPTXX:VPT:SPIS-AA¹⁷-LYI, HVPKPXX:APT:SPIS-AA¹⁷-LYI, RVPSTXX:APV:SPIS-AA¹⁷-LYI, ASAAPXX:VPQ:SPIS-AA¹⁷-LYI, ASASPXX:VSQ:SPIS-AA¹⁷-LYI, ASASPXX:VPQ:SPIS-AA¹⁷-LYI, NDEGLEX:VPT:SPIS-AA¹⁷-LYI, SSVKXQP:SRV:SPIS-AA¹⁷-LYI, RNVQXRP:TQV:SPIS-AA¹⁷-LYI, KIPKAXX:VPT:SPIS-AA¹⁷-LFI, GIPEPXX:VPT:SPIS-AA¹⁷-LFI, SIPKAXX:VPT:SPIS-AA¹⁷-LFI, HVTKPTX:VPT:SPIS-AA¹⁷-LFI, YVPKPXX:VPT:SPIS-AA¹⁷-LFI, TVPKPXX:VPT:SPIS-AA¹⁷-LFI, AVPKAXX:VPT:SPIS-AA¹⁷-LFI, KVGKAXX:VPT:SPIS-AA¹⁷-LFI, KASKAXX:VPT:SPIS-AA¹⁷-LFI, GSAGPXX:VPT:SPIS-AA¹⁷-LFI, AAPASXX:VPT:SPIS-AA¹⁷-LFI, HVPKPXX:VPT:SPIS-AA¹⁷-LFI, RVPSTXX:VPT:SPIS-AA¹⁷-LFI, ASAAPXX:VPT:SPIS-AA¹⁷-LFI, ASASPXX:VPT:SPIS-AA¹⁷-LFI, GIPEPXX:VPE:SPIS-AA¹⁷-LFI, HVTKPTX:APT:SPIS-AA¹⁷-LFI, YVPKPXX:APT:SPIS-AA¹⁷-LFI, TVPKPXX:APT:SPIS-AA¹⁷-LFI, AVPKAXX:APT:SPIS-AA¹⁷-LFI, GSAGPXX:TPT:SPIS-AA¹⁷-LFI, AAPASXX:VPA:SPIS-AA¹⁷-LFI, HVPKPXX:APT:SPIS-AA¹⁷-LFI, RVPSTXX:APV:SPIS-AA¹⁷-LFI, ASAAPXX:VPQ:SPIS-AA¹⁷-LFI, ASASPXX:VSQ:SPIS-AA¹⁷-LFI, ASASPXX:VPQ:SPIS-AA¹⁷-LFI, SSVKXQP:SRV:SPIS-AA¹⁷-LFI, RNVQXRP:TQV:SPIS-AA¹⁷-LFI, KIPKAXX:APV:KPLS-AA¹⁷-LYV, GIPEPXX:APV:KPLS-AA¹⁷-LYV, SIPKAXX:APV:KPLS-AA¹⁷-LYV, HVTKPTX:APV:KPLS-AA¹⁷-LYV, YVPKPXX:APV:KPLS-AA¹⁷-LYV, TVPKPXX:APV:KPLS-AA¹⁷-LYV, AVPKAXX:APV:KPLS-AA¹⁷-LYV, KVGKAXX:APV:KPLS-AA¹⁷-LYV, KASKAXX:APV:KPLS-AA¹⁷-LYV, GSAGPXX:APV:KPLS-AA¹⁷-LYV, AAPASXX:APV:KPLS-AA¹⁷-LYV, STPPTXX:APV:KPLS-AA¹⁷-LYV, HVPKPXX:APV:KPLS-AA¹⁷-LYV, ASAAPXX:APV:KPLS-AA¹⁷-LYV, ASASPXX:APV:KPLS-AA¹⁷-LYV, KIPKAXX:VPT:KPLS-AA¹⁷-LYV, GIPEPXX:VPE:KPLS-AA¹⁷-LYV, SIPKAXX:VPT:KPLS-AA¹⁷-LYV, HVTKPTX:APT:KPLS-AA¹⁷-LYV, YVPKPXX:APT:KPLS-AA¹⁷-LYV, TVPKPXX:APT:KPLS-AA¹⁷-LYV, AVPKAXX:APT:KPLS-AA¹⁷-LYV, KVGKAXX:VPT:KPLS-AA¹⁷-LYV, KASKAXX:VPT:KPLS-AA¹⁷-LYV, GSAGPXX:TPT:KPLS-AA¹⁷-LYV, AAPASXX:VPA:KPLS-AA¹⁷-LYV, STPPTXX:VPT:KPLS-AA¹⁷-LYV, HVPKPXX:APT:KPLS-AA¹⁷-LYV, ASAAPXX:VPQ:KPLS-AA¹⁷-LYV, ASASPXX:VSQ:KPLS-AA¹⁷-LYV, ASASPXX:VPQ:KPLS-AA¹⁷-LYV, NDEGLEX:VPT:KPLS-AA¹⁷-LYV, SSVKXQP:SRV:KPLS-AA¹⁷-LYV, RNVQXRP:TQV:KPLS-AA¹⁷-LYV, KIPKAXX:VPQ:EPLP-AA¹⁷-VYY, GIPEPXX:VPQ:EPLP-AA¹⁷-VYY, SIPKAXX:VPQ:EPLP-AA¹⁷-VYY, HVTKPTX:VPQ:EPLP-AA¹⁷-VYY, YVPKPXX:VPQ:EPLP-AA¹⁷-VYY, TVPKPXX:VPQ:EPLP-AA¹⁷-VYY, AVPKAXX:VPQ:EPLP-AA¹⁷-VYY, KVGKAXX:VPQ:EPLP-AA¹⁷-VYY, KASKAXX:VPQ:EPLP-AA¹⁷-VYY, GSAGPXX:VPQ:EPLP-AA¹⁷-VYY, AAPASXX:VPQ:EPLP-AA¹⁷-VYY, STPPTXX:VPQ:EPLP-AA¹⁷-VYY, HVPKPXX:VPQ:EPLP-AA¹⁷-VYY, RVPSTXX:VPQ:EPLP-AA¹⁷-VYY, ASASPXX:VPQ:EPLP-AA¹⁷-VYY, KIPKAXX:VPT:EPLP-AA¹⁷-VYY, GIPEPXX:VPE:EPLP-AA¹⁷-VYY, SIPKAXX:VPT:EPLP-AA¹⁷-VYY, HVTKPTX:APT:EPLP-AA¹⁷-VYY, YVPKPXX:APT:EPLP-AA¹⁷-VYY, TVPKPXX:APT:EPLP-AA¹⁷-VYY, AVPKAXX:APT:EPLP-AA¹⁷-VYY, KVGKAXX:VPT:EPLP-AA¹⁷-VYY, KASKAXX:VPT:EPLP-AA¹⁷-VYY, GSAGPXX:TPT:EPLP-AA¹⁷-VYY, AAPASXX:VPA:EPLP-AA¹⁷-VYY, STPPTXX:VPT:EPLP-AA¹⁷-VYY, HVPKPXX:APT:EPLP-AA¹⁷-VYY, RVPSTXX:APV:EPLP-AA¹⁷-VYY, ASASPXX:VSQ:EPLP-AA¹⁷-VYY, NDEGLEX:VPT:EPLP-AA¹⁷-VYY, SSVKXQP:SRV:EPLP-AA¹⁷-VYY, RNVQXRP:TQV:EPLP-AA¹⁷-VYY, KIPKAXX:VSQ:EPLT-AA¹⁷-LYY, GIPEPXX:VSQ:EPLT-AA¹⁷-LYY, SIPKAXX:VSQ:EPLT-AA¹⁷-LYY, HVTKPTX:VSQ:EPLT-AA¹⁷-LYY, YVPKPXX:VSQ:EPLT-AA¹⁷-LYY, TVPKPXX:VSQ:EPLT-AA¹⁷-LYY, AVPKAXX:VSQ:EPLT-AA¹⁷-LYY, KVGKAXX:VSQ:EPLT-AA¹⁷-LYY, KASKAXX:VSQ:EPLT-AA¹⁷-LYY, GSAGPXX:VSQ:EPLT-AA¹⁷-LYY, AAPASXX:VSQ:EPLT-AA¹⁷-LYY, STPPTXX:VSQ:EPLT-AA¹⁷-LYY, HVPKPXX:VSQ:EPLT-AA¹⁷-LYY, RVPSTXX:VSQ:EPLT-AA¹⁷-LYY, ASAAPXX:VSQ:EPLT-AA¹⁷-LYY, ASASPXX:VSQ:EPLT-AA¹⁷-LYY, KIPKAXX:VPT:EPLT-AA¹⁷-LYY, GIPEPXX:VPE:EPLT-AA¹⁷-LYY, SIPKAXX:VPT:EPLT-AA¹⁷-LYY, HVTKPTX:APT:EPLT-AA¹⁷-LYY, YVPKPXX:APT:EPLT-AA¹⁷-LYY, TVPKPXX:APT:EPLT-AA¹⁷-LYY, AVPKAXX:APT:EPLT-AA¹⁷-LYY, KVGKAXX:VPT:EPLT-AA¹⁷-LYY, KASKAXX:VPT:EPLT-AA¹⁷-LYY, GSAGPXX:TPT:EPLT-AA¹⁷-LYY, AAPASXX:VPA:EPLT-AA¹⁷-LYY, STPPTXX:VPT:EPLT-AA¹⁷-LYY, HVPKPXX:APT:EPLT-AA¹⁷-LYY, RVPSTXX:APV:EPLT-AA¹⁷-LYY, ASAAPXX:VPQ:EPLT-AA¹⁷-LYY, NDEGLEX:VPT:EPLT-AA¹⁷-LYY, SSVKXQP:SRV:EPLT-AA¹⁷-LYY, RNVQXRP:TQV:EPLT-AA¹⁷-LYY, KIPKAXX:VPQ:EPLT-AA¹⁷-LYY, GIPEPXX:VPQ:EPLT-AA¹⁷-LYY, SIPKAXX:VPQ:EPLT-AA¹⁷-LYY, HVTKPTX:VPQ:EPLT-AA¹⁷-LYY, YVPKPXX:VPQ:EPLT-AA¹⁷-LYY, TVPKPXX:VPQ:EPLT-AA¹⁷-LYY, AVPKAXX:VPQ:EPLT-AA¹⁷-LYY, KVGKAXX:VPQ:EPLT-AA¹⁷-LYY, KASKAXX:VPQ:EPLT-AA¹⁷-LYY, GSAGPXX:VPQ:EPLT-AA¹⁷-LYY, AAPASXX:VPQ:EPLT-AA¹⁷-LYY, STPPTXX:VPQ:EPLT-AA¹⁷-LYY, HVPKPXX:VPQ:EPLT-AA¹⁷-LYY, RVPSTXX:VPQ:EPLT-AA¹⁷-LYY, ASASPXX:VPQ:EPLT-AA¹⁷-LYY, NDEGLEX:VPT:SNIT-AA¹⁷-QIM, GIPEPXX:VPE:SNIT-AA¹⁷-QIM, HVTKPTX:APT:SNIT-AA¹⁷-QIM, YVPKPXX:APT:SNIT-AA¹⁷-QIM, TVPKPXX:APT:SNIT-AA¹⁷-QIM, AVPKAXX:APT:SNIT-AA¹⁷-QIM, GSAGPXX:TPT:SNIT-AA¹⁷-QIM, AAPASXX:VPA:SNIT-AA¹⁷-QIM, HVPKPXX:APT:SNIT-AA¹⁷-QIM, RVPSTXX:APV:SNIT-AA¹⁷-QIM, ASAAPXX:VPQ:SNIT-AA¹⁷-QIM, ASASPXX:VSQ:SNIT-AA¹⁷-QIM, ASASPXX:VPQ:SNIT-AA¹⁷-QIM, SSVKXQP:SRV:SNIT-AA¹⁷-QIM, RNVQXRP:TQV:SNIT-AA¹⁷-QIM, RNVQXRP:SRV:RSVK-AA¹⁷-AKV, KIPKAXX:VPT:RSVK-AA¹⁷-AKV, GIPEPXX:VPE:RSVK-AA¹⁷-AKV, SIPKAXX:VPT:RSVK-AA¹⁷-AKV, HVTKPTX:APT:RSVK-AA¹⁷-AKV, YVPKPXX:APT:RSVK-AA¹⁷-AKV, TVPKPXX:APT:RSVK-AA¹⁷-AKV, AVPKAXX:APT:RSVK-AA¹⁷-AKV, KVGKAXX:VPT:RSVK-AA¹⁷-AKV, KASKAXX:VPT:RSVK-AA¹⁷-AKV, GSAGPXX:TPT:RSVK-AA¹⁷-AKV, AAPASXX:VPA:RSVK-AA¹⁷-AKV, STPPTXX:VPT:RSVK-AA¹⁷-AKV, HVPKPXX:APT:RSVK-AA¹⁷-AKV, RVPSTXX:APV:RSVK-AA¹⁷-AKV, ASAAPXX:VPQ:RSVK-AA¹⁷-AKV, ASASPXX:VSQ:RSVK-AA¹⁷-AKV, ASASPXX:VPQ:RSVK-AA¹⁷-AKV, NDEGLEX:VPT:RSVK-AA¹⁷-AKV, RNVQXRP:TQV:RSVK-AA¹⁷-AKV, SSVKXQP:TQV:RPVQ-AA¹⁷-RKI, KIPKAXX:VPT:RPVQ-AA¹⁷-RKI, GIPEPXX:VPE:RPVQ-AA¹⁷-RKI, SIPKAXX:VPT:RPVQ-AA¹⁷-RKI, HVTKPTX:APT:RPVQ-AA¹⁷-RKI, YVPKPXX:APT:RPVQ-AA¹⁷-RKI, TVPKPXX:APT:RPVQ-AA¹⁷-RKI, AVPKAXX:APT:RPVQ-AA¹⁷-RKI, KVGKAXX:VPT:RPVQ-AA¹⁷-RKI, KASKAXX:VPT:RPVQ-AA¹⁷-RKI, GSAGPXX:TPT:RPVQ-AA¹⁷-RKI, AAPASXX:VPA:RPVQ-AA¹⁷-RKI, STPPTXX:VPT:RPVQ-AA¹⁷-RKI, HVPKPXX:APT:RPVQ-AA¹⁷-RKI, RVPSTXX:APV:RPVQ-AA¹⁷-RKI, ASAAPXX:VPQ:RPVQ-AA¹⁷-RKI, ASASPXX:VSQ:RPVQ-AA¹⁷-RKI, ASASPXX:VPQ:RPVQ-AA¹⁷-RKI, NDEGLEX:VPT:RPVQ-AA¹⁷-RKI and SSVKXQP:SRV:RPVQ-AA¹⁷-RKI; and wherein AA¹⁷ is selected from the group consisting of G, A, V, L, I, P, F, M, W, T and S (in particular is selected from the group consisting of M, I, L, V and T).

[0272] In certain embodiments, the triplet PEP7:PEP5:PEP1 is selected from the group consisting of GIPEPXX:VPTKM:SAIS, HVTKPTX:VPTKL:SAIS, YVPKPXX:VPTKL:SAIS, TVPKPXX:VPTQL:SAIS, AVPKAXX:VPTKL:SAIS, KVGKAXX:VPTKL:SAIS, KASKAXX:VPTKL:SAIS, GSAGPXX:VPTKM:SAIS, AAPASXX:VPTRL:SAIS, STPPTXX:VPTRL:SAIS, HVPKPXX:VPTKL:SAIS, RVPSTXX:VPTKT:SAIS, ASAAPXX:VPTAL:SAIS, ASASPXX:VPTDL:SAIS, GIPEPXX:VPEKM:SAIS, HVTKPTX:APTKL:SAIS, YVPKPXX:APTKL:SAIS, TVPKPXX:APTQL:SAIS, AVPKAXX:APTKL:SAIS, GSAGPXX:TPTKM:SAIS, AAPASXX:VPARL:SAIS, HVPKPXX:APTKL:SAIS, RVPSTXX:APVKT:SAIS, ASAAPXX:VPQAL:SAIS, ASASPXX:VSQDL:SAIS, ASASPXX:VPQDL:SAIS, SSVKXQP:SRVHH:SAIS, RNVQXRP:TQVQL:SAIS, KIPKAXX:VPEEL:SSLS, SIPKAXX:VPEEL:SSLS, HVTKPTX:VPEKL:SSLS, YVPKPXX:VPEKL:SSLS, TVPKPXX:VPEQL:SSLS, AVPKAXX:VPEKL:SSLS, KVGKAXX:VPEKL:SSLS, KASKAXX:VPEKL:SSLS, GSAGPXX:VPEKM:SSLS, AAPASXX:VPERL:SSLS, STPPTXX:VPERL:SSLS, HVPKPXX:VPEKL:SSLS, RVPSTXX:VPEKT:SSLS, ASAAPXX:VPEAL:SSLS, ASASPXX:VPEDL:SSLS, KIPKAXX:VPTEL:SSLS, SIPKAXX:VPTEL:SSLS, HVTKPTX:APTKL:SSLS, YVPKPXX:APTKL:SSLS, TVPKPXX:APTQL:SSLS, AVPKAXX:APTKL:SSLS, KVGKAXX:VPTKL:SSLS, KASKAXX:VPTKL:SSLS, GSAGPXX:TPTKM:SSLS, AAPASXX:VPARL:SSLS, STPPTXX:VPTRL:SSLS, HVPKPXX:APTKL:SSLS, RVPSTXX:APVKT:SSLS, ASAAPXX:VPQAL:SSLS, ASASPXX:VSQDL:SSLS, ASASPXX:VPQDL:SSLS, NDEGLEX:VPTEE:SSLS, NDEGLEX:VPTGQ:SSLS, SSVKXQP:SRVHH:SSLS, RNVQXRP:TQVQL:SSLS, KIPKAXX:APTEL:NAIS, GIPEPXX:APTKM:NAIS, SIPKAXX:APTEL:NAIS, AVPKAXX:APTKL:NAIS, KVGKAXX:APTKL:NAIS, KASKAXX:APTKL:NAIS, GSAGPXX:APTKM:NAIS, AAPASXX:APTRL:NAIS, STPPTXX:APTRL:NAIS, RVPSTXX:APTKT:NAIS, ASAAPXX:APTAL:NAIS, ASASPXX:APTDL:NAIS, KIPKAXX:VPTEL:NAIS, GIPEPXX:VPEKM:NAIS, SIPKAXX:VPTEL:NAIS, KVGKAXX:VPTKL:NAIS, KASKAXX:VPTKL:NAIS, GSAGPXX:TPTKM:NAIS, AAPASXX:VPARL:NAIS, STPPTXX:VPTRL:NAIS, RVPSTXX:APVKT:NAIS, ASAAPXX:VPQAL:NAIS, ASASPXX:VSQDL:NAIS, ASASPXX:VPQDL:NAIS, NDEGLEX:VPTEE:NAIS, NDEGLEX:VPTGQ:NAIS, SSVKXQP:SRVHH:NAIS, RNVQXRP:TQVQL:NAIS, KIPKAXX:APTEL:SATS, GIPEPXX:APTKM:SATS, SIPKAXX:APTEL:SATS, HVTKPTX:APTKL:SATS, YVPKPXX:APTKL:SATS, TVPKPXX:APTQL:SATS, KVGKAXX:APTKL:SATS, KASKAXX:APTKL:SATS, GSAGPXX:APTKM:SATS, AAPASXX:APTRL:SATS, STPPTXX:APTRL:SATS, HVPKPXX:APTKL:SATS, RVPSTXX:APTKT:SATS, ASAAPXX:APTAL:SATS, ASASPXX:APTDL:SATS, KIPKAXX:VPTEL:SATS, GIPEPXX:VPEKM:SATS, SIPKAXX:VPTEL:SATS, KVGKAXX:VPTKL:SATS, KASKAXX:VPTKL:SATS, GSAGPXX:TPTKM:SATS, AAPASXX:VPARL:SATS, STPPTXX:VPTRL:SATS, RVPSTXX:APVKT:SATS, ASAAPXX:VPQAL:SATS, ASASPXX:VSQDL:SATS, ASASPXX:VPQDL:SATS, NDEGLEX:VPTEE:SATS, NDEGLEX:VPTGQ:SATS, SSVKXQP:SRVHH:SATS, RNVQXRP:TQVQL:SATS, KIPKAXX:VPTEL:SPIS, GIPEPXX:VPTKM:SPIS, SIPKAXX:VPTEL:SPIS, HVTKPTX:VPTKL:SPIS, YVPKPXX:VPTKL:SPIS, TVPKPXX:VPTQL:SPIS, AVPKAXX:VPTKL:SPIS, KASKAXX:VPTKL:SPIS, GSAGPXX:VPTKM:SPIS, AAPASXX:VPTRL:SPIS, STPPTXX:VPTRL:SPIS, HVPKPXX:VPTKL:SPIS, RVPSTXX:VPTKT:SPIS, ASAAPXX:VPTAL:SPIS, ASASPXX:VPTDL:SPIS, GIPEPXX:VPEKM:SPIS, HVTKPTX:APTKL:SPIS, YVPKPXX:APTKL:SPIS, TVPKPXX:APTQL:SPIS, AVPKAXX:APTKL:SPIS, GSAGPXX:TPTKM:SPIS, AAPASXX:VPARL:SPIS, HVPKPXX:APTKL:SPIS, RVPSTXX:APVKT:SPIS, ASAAPXX:VPQAL:SPIS, ASASPXX:VSQDL:SPIS, ASASPXX:VPQDL:SPIS, SSVKXQP:SRVHH:SPIS, RNVQXRP:TQVQL:SPIS, KIPKAXX:VPTEL:EPIS, GIPEPXX:VPTKM:EPIS, SIPKAXX:VPTEL:EPIS, HVTKPTX:VPTKL:EPIS, YVPKPXX:VPTKL:EPIS, TVPKPXX:VPTQL:EPIS, AVPKAXX:VPTKL:EPIS, KVGKAXX:VPTKL:EPIS, GSAGPXX:VPTKM:EPIS, AAPASXX:VPTRL:EPIS, STPPTXX:VPTRL:EPIS, HVPKPXX:VPTKL:EPIS, RVPSTXX:VPTKT:EPIS, ASAAPXX:VPTAL:EPIS, ASASPXX:VPTDL:EPIS, GIPEPXX:VPEKM:EPIS, HVTKPTX:APTKL:EPIS, YVPKPXX:APTKL:EPIS, TVPKPXX:APTQL:EPIS, AVPKAXX:APTKL:EPIS, GSAGPXX:TPTKM:EPIS, AAPASXX:VPARL:EPIS, HVPKPXX:APTKL:EPIS, RVPSTXX:APVKT:EPIS, ASAAPXX:VPQAL:EPIS, ASASPXX:VSQDL:EPIS, ASASPXX:VPQDL:EPIS, SSVKXQP:SRVHH:EPIS, RNVQXRP:TQVQL:EPIS, KIPKAXX:TPTEL:SPIN, GIPEPXX:TPTKM:SPIN, SIPKAXX:TPTEL:SPIN, HVTKPTX:TPTKL:SPIN, YVPKPXX:TPTKL:SPIN, TVPKPXX:TPTQL:SPIN, AVPKAXX:TPTKL:SPIN, KVGKAXX:TPTKL:SPIN, KASKAXX:TPTKL:SPIN, AAPASXX:TPTRL:SPIN, STPPTXX:TPTRL:SPIN, HVPKPXX:TPTKL:SPIN, RVPSTXX:TPTKT:SPIN, ASAAPXX:TPTAL:SPIN, ASASPXX:TPTDL:SPIN, KIPKAXX:VPTEL:SPIN, GIPEPXX:VPEKM:SPIN, SIPKAXX:VPTEL:SPIN, HVTKPTX:APTKL:SPIN, YVPKPXX:APTKL:SPIN, TVPKPXX:APTQL:SPIN, AVPKAXX:APTKL:SPIN, KVGKAXX:VPTKL:SPIN, KASKAXX:VPTKL:SPIN, AAPASXX:VPARL:SPIN, STPPTXX:VPTRL:SPIN, HVPKPXX:APTKL:SPIN, RVPSTXX:APVKT:SPIN, ASAAPXX:VPQAL:SPIN, ASASPXX:VSQDL:SPIN, ASASPXX:VPQDL:SPIN, NDEGLEX:VPTEE:SPIN, NDEGLEX:VPTGQ:SPIN, SSVKXQP:SRVHH:SPIN, RNVQXRP:TQVQL:SPIN, KIPKAXX:VPAEL:SPIS, GIPEPXX:VPAKM:SPIS, SIPKAXX:VPAEL:SPIS, HVTKPTX:VPAKL:SPIS, YVPKPXX:VPAKL:SPIS, TVPKPXX:VPAQL:SPIS, AVPKAXX:VPAKL:SPIS, KVGKAXX:VPAKL:SPIS, KASKAXX:VPAKL:SPIS, GSAGPXX:VPAKM:SPIS, STPPTXX:VPARL:SPIS, HVPKPXX:VPAKL:SPIS, RVPSTXX:VPAKT:SPIS, ASAAPXX:VPAAL:SPIS, ASASPXX:VPADL:SPIS, KVGKAXX:VPTKL:SPIS, NDEGLEX:VPTEE:SPIS, NDEGLEX:VPTGQ:SPIS, KIPKAXX:APVEL:KPLS, GIPEPXX:APVKM:KPLS, SIPKAXX:APVEL:KPLS, HVTKPTX:APVKL:KPLS, YVPKPXX:APVKL:KPLS, TVPKPXX:APVQL:KPLS, AVPKAXX:APVKL:KPLS, KVGKAXX:APVKL:KPLS, KASKAXX:APVKL:KPLS, GSAGPXX:APVKM:KPLS, AAPASXX:APVRL:KPLS, STPPTXX:APVRL:KPLS, HVPKPXX:APVKL:KPLS, ASAAPXX:APVAL:KPLS, ASASPXX:APVDL:KPLS, KIPKAXX:VPTEL:KPLS, GIPEPXX:VPEKM:KPLS, SIPKAXX:VPTEL:KPLS, HVTKPTX:APTKL:KPLS, YVPKPXX:APTKL:KPLS, TVPKPXX:APTQL:KPLS, AVPKAXX:APTKL:KPLS, KVGKAXX:VPTKL:KPLS, KASKAXX:VPTKL:KPLS, GSAGPXX:TPTKM:KPLS, AAPASXX:VPARL:KPLS, STPPTXX:VPTRL:KPLS, HVPKPXX:APTKL:KPLS, ASAAPXX:VPQAL:KPLS, ASASPXX:VSQDL:KPLS, ASASPXX:VPQDL:KPLS, NDEGLEX:VPTEE:KPLS, NDEGLEX:VPTGQ:KPLS, SSVKXQP:SRVHH:KPLS, RNVQXRP:TQVQL:KPLS, KIPKAXX:VPQEL:EPLP, GIPEPXX:VPQKM:EPLP, SIPKAXX:VPQEL:EPLP, HVTKPTX:VPQKL:EPLP, YVPKPXX:VPQKL:EPLP, TVPKPXX:VPQQL:EPLP, AVPKAXX:VPQKL:EPLP, KVGKAXX:VPQKL:EPLP, KASKAXX:VPQKL:EPLP, GSAGPXX:VPQKM:EPLP, AAPASXX:VPQRL:EPLP, STPPTXX:VPQRL:EPLP, HVPKPXX:VPQKL:EPLP, RVPSTXX:VPQKT:EPLP, ASASPXX:VPQDL:EPLP, KIPKAXX:VPTEL:EPLP, GIPEPXX:VPEKM:EPLP, SIPKAXX:VPTEL:EPLP, HVTKPTX:APTKL:EPLP, YVPKPXX:APTKL:EPLP, TVPKPXX:APTQL:EPLP, AVPKAXX:APTKL:EPLP, KVGKAXX:VPTKL:EPLP, KASKAXX:VPTKL:EPLP, GSAGPXX:TPTKM:EPLP, AAPASXX:VPARL:EPLP, STPPTXX:VPTRL:EPLP, HVPKPXX:APTKL:EPLP, RVPSTXX:APVKT:EPLP, ASASPXX:VSQDL:EPLP, NDEGLEX:VPTEE:EPLP, NDEGLEX:VPTGQ:EPLP, SSVKXQP:SRVHH:EPLP, RNVQXRP:TQVQL:EPLP, KIPKAXX:VSQEL:EPLT, GIPEPXX:VSQKM:EPLT, SIPKAXX:VSQEL:EPLT, HVTKPTX:VSQKL:EPLT, YVPKPXX:VSQKL:EPLT, TVPKPXX:VSQQL:EPLT, AVPKAXX:VSQKL:EPLT, KVGKAXX:VSQKL:EPLT, KASKAXX:VSQKL:EPLT, GSAGPXX:VSQKM:EPLT, AAPASXX:VSQRL:EPLT, STPPTXX:VSQRL:EPLT, HVPKPXX:VSQKL:EPLT, RVPSTXX:VSQKT:EPLT, ASAAPXX:VSQAL:EPLT, ASASPXX:VSQDL:EPLT, KIPKAXX:VPTEL:EPLT, GIPEPXX:VPEKM:EPLT, SIPKAXX:VPTEL:EPLT, HVTKPTX:APTKL:EPLT, YVPKPXX:APTKL:EPLT, TVPKPXX:APTQL:EPLT, AVPKAXX:APTKL:EPLT, KVGKAXX:VPTKL:EPLT, KASKAXX:VPTKL:EPLT, GSAGPXX:TPTKM:EPLT, AAPASXX:VPARL:EPLT, STPPTXX:VPTRL:EPLT, HVPKPXX:APTKL:EPLT, RVPSTXX:APVKT:EPLT, ASAAPXX:VPQAL:EPLT, NDEGLEX:VPTEE:EPLT, NDEGLEX:VPTGQ:EPLT, SSVKXQP:SRVHH:EPLT, RNVQXRP:TQVQL:EPLT, KIPKAXX:VPQEL:EPLT, GIPEPXX:VPQKM:EPLT, SIPKAXX:VPQEL:EPLT, HVTKPTX:VPQKL:EPLT, YVPKPXX:VPQKL:EPLT, TVPKPXX:VPQQL:EPLT, AVPKAXX:VPQKL:EPLT, KVGKAXX:VPQKL:EPLT, KASKAXX:VPQKL:EPLT, GSAGPXX:VPQKM:EPLT, AAPASXX:VPQRL:EPLT, STPPTXX:VPQRL:EPLT, HVPKPXX:VPQKL:EPLT, RVPSTXX:VPQKT:EPLT, ASASPXX:VPQDL:EPLT, NDEGLEX:VPTGQ:SNIT, GIPEPXX:VPEKM:SNIT, HVTKPTX:APTKL:SNIT, YVPKPXX:APTKL:SNIT, TVPKPXX:APTQL:SNIT, AVPKAXX:APTKL:SNIT, GSAGPXX:TPTKM:SNIT, AAPASXX:VPARL:SNIT, HVPKPXX:APTKL:SNIT, RVPSTXX:APVKT:SNIT, ASAAPXX:VPQAL:SNIT, ASASPXX:VSQDL:SNIT, ASASPXX:VPQDL:SNIT, SSVKXQP:SRVHH:SNIT, RNVQXRP:TQVQL:SNIT, RNVQXRP:SRVQL:RSVK, KIPKAXX:VPTEL:RSVK, GIPEPXX:VPEKM:RSVK, SIPKAXX:VPTEL:RSVK, HVTKPTX:APTKL:RSVK, YVPKPXX:APTKL:RSVK, TVPKPXX:APTQL:RSVK, AVPKAXX:APTKL:RSVK, KVGKAXX:VPTKL:RSVK, KASKAXX:VPTKL:RSVK, GSAGPXX:TPTKM:RSVK, AAPASXX:VPARL:RSVK, STPPTXX:VPTRL:RSVK, HVPKPXX:APTKL:RSVK, RVPSTXX:APVKT:RSVK, ASAAPXX:VPQAL:RSVK, ASASPXX:VSQDL:RSVK, ASASPXX:VPQDL:RSVK, NDEGLEX:VPTEE:RSVK, NDEGLEX:VPTGQ:RSVK, RNVQXRP:TQVQL:RSVK, SSVKXQP:TQVHH:RPVQ, KIPKAXX:VPTEL:RPVQ, GIPEPXX:VPEKM:RPVQ, SIPKAXX:VPTEL:RPVQ, HVTKPTX:APTKL:RPVQ, YVPKPXX:APTKL:RPVQ, TVPKPXX:APTQL:RPVQ, AVPKAXX:APTKL:RPVQ, KVGKAXX:VPTKL:RPVQ, KASKAXX:VPTKL:RPVQ, GSAGPXX:TPTKM:RPVQ, AAPASXX:VPARL:RPVQ, STPPTXX:VPTRL:RPVQ, HVPKPXX:APTKL:RPVQ, RVPSTXX:APVKT:RPVQ, ASAAPXX:VPQAL:RPVQ, ASASPXX:VSQDL:RPVQ, ASASPXX:VPQDL:RPVQ, NDEGLEX:VPTEE:RPVQ, NDEGLEX:VPTGQ:RPVQ and SSVKXQP:SRVHH:RPVQ.

[0273] In certain embodiments, the triplet PEP7:PEP5:PEP12 is selected from the group consisting of GIPEPXX:VPTKM:SAIS-AA¹⁷-LYL, HVTKPTX:VPTKL:SAIS-AA¹⁷-LYL, YVPKPXX:VPTKL:SAIS-AA¹⁷-LYL, TVPKPXX:VPTQL:SAIS-AA¹⁷-LYL, AVPKAXX:VPTKL:SAIS-AA¹⁷-LYL, KVGKAXX:VPTKL:SAIS-AA¹⁷-LYL, KASKAXX:VPTKL:SAIS-AA¹⁷-LYL, GSAGPXX:VPTKM:SAIS-AA¹⁷-LYL, AAPASXX:VPTRL:SAIS-AA¹⁷-LYL, STPPTXX:VPTRL:SAIS-AA¹⁷-LYL, HVPKPXX:VPTKL:SAIS-AA¹⁷-LYL, RVPSTXX:VPTKT:SAIS-AA¹⁷-LYL, ASAAPXX:VPTAL:SAIS-AA¹⁷-LYL, ASASPXX:VPTDL:SAIS-AA¹⁷-LYL, GIPEPXX:VPEKM:SAIS-AA¹⁷-LYL, HVTKPTX:APTKL:SAIS-AA¹⁷-LYL, YVPKPXX:APTKL:SAIS-AA¹⁷-LYL, TVPKPXX:APTQL:SAIS-AA¹⁷-LYL, AVPKAXX:APTKL:SAIS-AA¹⁷-LYL, GSAGPXX:TPTKM:SAIS-AA¹⁷-LYL, AAPASXX:VPARL:SAIS-AA¹⁷-LYL, HVPKPXX:APTKL:SAIS-AA¹⁷-LYL, RVPSTXX:APVKT:SAIS-AA¹⁷-LYL, ASAAPXX:VPQAL:SAIS-AA¹⁷-LYL, ASASPXX:VSQDL:SAIS-AA¹⁷-LYL, ASASPXX:VPQDL:SAIS-AA¹⁷-LYL, SSVKXQP:SRVHH:SAIS-AA¹⁷-LYL, RNVQXRP:TQVQL:SAIS-AA¹⁷-LYL, KIPKAXX:VPEEL:SSLS-AA¹⁷-LFF, SIPKAXX:VPEEL:SSLS-AA¹⁷-LFF, HVTKPTX:VPEKL:SSLS-AA¹⁷-LFF, YVPKPXX:VPEKL:SSLS-AA¹⁷-LFF, TVPKPXX:VPEQL:SSLS-AA¹⁷-LFF, AVPKAXX:VPEKL:SSLS-AA¹⁷-LFF, KVGKAXX:VPEKL:SSLS-AA¹⁷-LFF, KASKAXX:VPEKL:SSLS-AA¹⁷-LFF, GSAGPXX:VPEKM:SSLS-AA¹⁷-LFF, AAPASXX:VPERL:SSLS-AA¹⁷-LFF, STPPTXX:VPERL:SSLS-AA¹⁷-LFF, HVPKPXX:VPEKL:SSLS-AA¹⁷-LFF, RVPSTXX:VPEKT:SSLS-AA¹⁷-LFF, ASAAPXX:VPEAL:SSLS-AA¹⁷-LFF, ASASPXX:VPEDL:SSLS-AA¹⁷-LFF, KIPKAXX:VPTEL:SSLS-AA¹⁷-LFF, SIPKAXX:VPTEL:SSLS-AA¹⁷-LFF, HVTKPTX:APTKL:SSLS-AA¹⁷-LFF, YVPKPXX:APTKL:SSLS-AA¹⁷-LFF, TVPKPXX:APTQL:SSLS-AA¹⁷-LFF, AVPKAXX:APTKL:SSLS-AA¹⁷-LFF, KVGKAXX:VPTKL:SSLS-AA¹⁷-LFF, KASKAXX:VPTKL:SSLS-AA¹⁷-LFF, GSAGPXX:TPTKM:SSLS-AA¹⁷-LFF, AAPASXX:VPARL:SSLS-AA¹⁷-LFF, STPPTXX:VPTRL:SSLS-AA¹⁷-LFF, HVPKPXX:APTKL:SSLS-AA¹⁷-LFF, RVPSTXX:APVKT:SSLS-AA¹⁷-LFF, ASAAPXX:VPQAL:SSLS-AA¹⁷-LFF, ASASPXX:VSQDL:SSLS-AA¹⁷-LFF, ASASPXX:VPQDL:SSLS-AA¹⁷-LFF, NDEGLEX:VPTEE:SSLS-AA¹⁷-LFF, NDEGLEX:VPTGQ:SSLS-AA¹⁷-LFF, SSVKXQP:SRVHH:SSLS-AA¹⁷-LFF, RNVQXRP:TQVQL:SSLS-AA¹⁷-LFF, KIPKAXX:APTEL:NAIS-AA¹⁷-LYF, GIPEPXX:APTKM:NAIS-AA¹⁷-LYF, SIPKAXX:APTEL:NAIS-AA¹⁷-LYF, AVPKAXX:APTKL:NAIS-AA¹⁷-LYF, KVGKAXX:APTKL:NAIS-AA¹⁷-LYF, KASKAXX:APTKL:NAIS-AA¹⁷-LYF, GSAGPXX:APTKM:NAIS-AA¹⁷-LYF, AAPASXX:APTRL:NAIS-AA¹⁷-LYF, STPPTXX:APTRL:NAIS-AA¹⁷-LYF, RVPSTXX:APTKT:NAIS-AA¹⁷-LYF, ASAAPXX:APTAL:NAIS-AA¹⁷-LYF, ASASPXX:APTDL:NAIS-AA¹⁷-LYF, KIPKAXX:VPTEL:NAIS-AA¹⁷-LYF, GIPEPXX:VPEKM:NAIS-AA¹⁷-LYF, SIPKAXX:VPTEL:NAIS-AA¹⁷-LYF, KVGKAXX:VPTKL:NAIS-AA¹⁷-LYF, KASKAXX:VPTKL:NAIS-AA¹⁷-LYF, GSAGPXX:TPTKM:NAIS-AA¹⁷-LYF, AAPASXX:VPARL:NAIS-AA¹⁷-LYF, STPPTXX:VPTRL:NAIS-AA¹⁷-LYF, RVPSTXX:APVKT:NAIS-AA¹⁷-LYF, ASAAPXX:VPQAL:NAIS-AA¹⁷-LYF, ASASPXX:VSQDL:NAIS-AA¹⁷-LYF, ASASPXX:VPQDL:NAIS-AA¹⁷-LYF, NDEGLEX:VPTEE:NAIS-AA¹⁷-LYF, NDEGLEX:VPTGQ:NAIS-AA¹⁷-LYF, SSVKXQP:SRVHH:NAIS-AA¹⁷-LYF, RNVQXRP:TQVQL:NAIS-AA¹⁷-LYF, KIPKAXX:APTEL:SATS-AA¹⁷-LYY, GIPEPXX:APTKM:SATS-AA¹⁷-LYY, SIPKAXX:APTEL:SATS-AA¹⁷-LYY, HVTKPTX:APTKL:SATS-AA¹⁷-LYY, YVPKPXX:APTKL:SATS-AA¹⁷-LYY, TVPKPXX:APTQL:SATS-AA¹⁷-LYY, KVGKAXX:APTKL:SATS-AA¹⁷-LYY, KASKAXX:APTKL:SATS-AA¹⁷-LYY, GSAGPXX:APTKM:SATS-AA¹⁷-LYY, AAPASXX:APTRL:SATS-AA¹⁷-LYY, STPPTXX:APTRL:SATS-AA¹⁷-LYY, HVPKPXX:APTKL:SATS-AA¹⁷-LYY, RVPSTXX:APTKT:SATS-AA¹⁷-LYY, ASAAPXX:APTAL:SATS-AA¹⁷-LYY, ASASPXX:APTDL:SATS-AA¹⁷-LYY, KIPKAXX:VPTEL:SATS-AA¹⁷-LYY, GIPEPXX:VPEKM:SATS-AA¹⁷-LYY, SIPKAXX:VPTEL:SATS-AA¹⁷-LYY, KVGKAXX:VPTKL:SATS-AA¹⁷-LYY, KASKAXX:VPTKL:SATS-AA¹⁷-LYY, GSAGPXX:TPTKM:SATS-AA¹⁷-LYY, AAPASXX:VPARL:SATS-AA¹⁷-LYY, STPPTXX:VPTRL:SATS-AA¹⁷-LYY, RVPSTXX:APVKT:SATS-AA¹⁷-LYY, ASAAPXX:VPQAL:SATS-AA¹⁷-LYY, ASASPXX:VSQDL:SATS-AA¹⁷-LYY, ASASPXX:VPQDL:SATS-AA¹⁷-LYY, NDEGLEX:VPTEE:SATS-AA¹⁷-LYY, NDEGLEX:VPTGQ:SATS-AA¹⁷-LYY, SSVKXQP:SRVHH:SATS-AA¹⁷-LYY, RNVQXRP:TQVQL:SATS-AA¹⁷-LYY, KIPKAXX:VPTEL:SPIS-AA¹⁷-LYK, GIPEPXX:VPTKM:SPIS-AA¹⁷-LYK, SIPKAXX:VPTEL:SPIS-AA¹⁷-LYK, HVTKPTX:VPTKL:SPIS-AA¹⁷-LYK, YVPKPXX:VPTKL:SPIS-AA¹⁷-LYK, TVPKPXX:VPTQL:SPIS-AA¹⁷-LYK, AVPKAXX:VPTKL:SPIS-AA¹⁷-LYK, KASKAXX:VPTKL:SPIS-AA¹⁷-LYK, GSAGPXX:VPTKM:SPIS-AA¹⁷-LYK, AAPASXX:VPTRL:SPIS-AA¹⁷-LYK, STPPTXX:VPTRL:SPIS-AA¹⁷-LYK, HVPKPXX:VPTKL:SPIS-AA¹⁷-LYK, RVPSTXX:VPTKT:SPIS-AA¹⁷-LYK, ASAAPXX:VPTAL:SPIS-AA¹⁷-LYK, ASASPXX:VPTDL:SPIS-AA¹⁷-LYK, GIPEPXX:VPEKM:SPIS-AA¹⁷-LYK, HVTKPTX:APTKL:SPIS-AA¹⁷-LYK, YVPKPXX:APTKL:SPIS-AA¹⁷-LYK, TVPKPXX:APTQL:SPIS-AA¹⁷-LYK, AVPKAXX:APTKL:SPIS-AA¹⁷-LYK, GSAGPXX:TPTKM:SPIS-AA¹⁷-LYK, AAPASXX:VPARL:SPIS-AA¹⁷-LYK, HVPKPXX:APTKL:SPIS-AA¹⁷-LYK, RVPSTXX:APVKT:SPIS-AA¹⁷-LYK, ASAAPXX:VPQAL:SPIS-AA¹⁷-LYK, ASASPXX:VSQDL:SPIS-AA¹⁷-LYK, ASASPXX:VPQDL:SPIS-AA¹⁷-LYK, SSVKXQP:SRVHH:SPIS-AA¹⁷-LYK, RNVQXRP:TQVQL:SPIS-AA¹⁷-LYK, KIPKAXX:VPTEL:EPIS-AA¹⁷-LYL, GIPEPXX:VPTKM:EPIS-AA¹⁷-LYL, SIPKAXX:VPTEL:EPIS-AA¹⁷-LYL, HVTKPTX:VPTKL:EPIS-AA¹⁷-LYL, YVPKPXX:VPTKL:EPIS-AA¹⁷-LYL, TVPKPXX:VPTQL:EPIS-AA¹⁷-LYL, AVPKAXX:VPTKL:EPIS-AA¹⁷-LYL, KVGKAXX:VPTKL:EPIS-AA¹⁷-LYL, GSAGPXX:VPTKM:EPIS-AA¹⁷-LYL, AAPASXX:VPTRL:EPIS-AA¹⁷-LYL, STPPTXX:VPTRL:EPIS-AA¹⁷-LYL, HVPKPXX:VPTKL:EPIS-AA¹⁷-LYL, RVPSTXX:VPTKT:EPIS-AA¹⁷-LYL, ASAAPXX:VPTAL:EPIS-AA¹⁷-LYL, ASASPXX:VPTDL:EPIS-AA¹⁷-LYL, GIPEPXX:VPEKM:EPIS-AA¹⁷-LYL, HVTKPTX:APTKL:EPIS-AA¹⁷-LYL, YVPKPXX:APTKL:EPIS-AA¹⁷-LYL, TVPKPXX:APTQL:EPIS-AA¹⁷-LYL, AVPKAXX:APTKL:EPIS-AA¹⁷-LYL, GSAGPXX:TPTKM:EPIS-AA¹⁷-LYL, AAPASXX:VPARL:EPIS-AA¹⁷-LYL, HVPKPXX:APTKL:EPIS-AA¹⁷-LYL, RVPSTXX:APVKT:EPIS-AA¹⁷-LYL, ASAAPXX:VPQAL:EPIS-AA¹⁷-LYL, ASASPXX:VSQDL:EPIS-AA¹⁷-LYL, ASASPXX:VPQDL:EPIS-AA¹⁷-LYL, SSVKXQP:SRVHH:EPIS-AA¹⁷-LYL, RNVQXRP:TQVQL:EPIS-AA¹⁷-LYL, KIPKAXX:TPTEL:SPIN-AA¹⁷-LYF, GIPEPXX:TPTKM:SPIN-AA¹⁷-LYF, SIPKAXX:TPTEL:SPIN-AA¹⁷-LYF, HVTKPTX:TPTKL:SPIN-AA¹⁷-LYF, YVPKPXX:TPTKL:SPIN-AA¹⁷-LYF, TVPKPXX:TPTQL:SPIN-AA¹⁷-LYF, AVPKAXX:TPTKL:SPIN-AA¹⁷-LYF, KVGKAXX:TPTKL:SPIN-AA¹⁷-LYF, KASKAXX:TPTKL:SPIN-AA¹⁷-LYF, AAPASXX:TPTRL:SPIN-AA¹⁷-LYF, STPPTXX:TPTRL:SPIN-AA¹⁷-LYF, HVPKPXX:TPTKL:SPIN-AA¹⁷-LYF, RVPSTXX:TPTKT:SPIN-AA¹⁷-LYF, ASAAPXX:TPTAL:SPIN-AA¹⁷-LYF, ASASPXX:TPTDL:SPIN-AA¹⁷-LYF, KIPKAXX:VPTEL:SPIN-AA¹⁷-LYF, GIPEPXX:VPEKM:SPIN-AA¹⁷-LYF, SIPKAXX:VPTEL:SPIN-AA¹⁷-LYF, HVTKPTX:APTKL:SPIN-AA¹⁷-LYF, YVPKPXX:APTKL:SPIN-AA¹⁷-LYF, TVPKPXX:APTQL:SPIN-AA¹⁷-LYF, AVPKAXX:APTKL:SPIN-AA¹⁷-LYF, KVGKAXX:VPTKL:SPIN-AA¹⁷-LYF, KASKAXX:VPTKL:SPIN-AA¹⁷-LYF, AAPASXX:VPARL:SPIN-AA¹⁷-LYF, STPPTXX:VPTRL:SPIN-AA¹⁷-LYF, HVPKPXX:APTKL:SPIN-AA¹⁷-LYF, RVPSTXX:APVKT:SPIN-AA¹⁷-LYF, ASAAPXX:VPQAL:SPIN-AA¹⁷-LYF, ASASPXX:VSQDL:SPIN-AA¹⁷-LYF, ASASPXX:VPQDL:SPIN-AA¹⁷-LYF, NDEGLEX:VPTEE:SPIN-AA¹⁷-LYF, NDEGLEX:VPTGQ:SPIN-AA¹⁷-LYF, SSVKXQP:SRVHH:SPIN-AA¹⁷-LYF, RNVQXRP:TQVQL:SPIN-AA¹⁷-LYF, KIPKAXX:VPAEL:SPIS-AA¹⁷-LYI, GIPEPXX:VPAKM:SPIS-AA¹⁷-LYI, SIPKAXX:VPAEL:SPIS-AA¹⁷-LYI, HVTKPTX:VPAKL:SPIS-AA¹⁷-LYI, YVPKPXX:VPAKL:SPIS-AA¹⁷-LYI, TVPKPXX:VPAQL:SPIS-AA¹⁷-LYI, AVPKAXX:VPAKL:SPIS-AA¹⁷-LYI, KVGKAXX:VPAKL:SPIS-AA¹⁷-LYI, KASKAXX:VPAKL:SPIS-AA¹⁷-LYI, GSAGPXX:VPAKM:SPIS-AA¹⁷-LYI, STPPTXX:VPARL:SPIS-AA¹⁷-LYI, HVPKPXX:VPAKL:SPIS-AA¹⁷-LYI, RVPSTXX:VPAKT:SPIS-AA¹⁷-LYI, ASAAPXX:VPAAL:SPIS-AA¹⁷-LYI, ASASPXX:VPADL:SPIS-AA¹⁷-LYI, KIPKAXX:VPTEL:SPIS-AA¹⁷-LYI, GIPEPXX:VPEKM:SPIS-AA¹⁷-LYI, SIPKAXX:VPTEL:SPIS-AA¹⁷-LYI, HVTKPTX:APTKL:SPIS-AA¹⁷-LYI, YVPKPXX:APTKL:SPIS-AA¹⁷-LYI, TVPKPXX:APTQL:SPIS-AA¹⁷-LYI, AVPKAXX:APTKL:SPIS-AA¹⁷-LYI, KVGKAXX:VPTKL:SPIS-AA¹⁷-LYI, KASKAXX:VPTKL:SPIS-AA¹⁷-LYI, GSAGPXX:TPTKM:SPIS-AA¹⁷-LYI, STPPTXX:VPTRL:SPIS-AA¹⁷-LYI, HVPKPXX:APTKL:SPIS-AA¹⁷-LYI, RVPSTXX:APVKT:SPIS-AA¹⁷-LYI, ASAAPXX:VPQAL:SPIS-AA¹⁷-LYI, ASASPXX:VSQDL:SPIS-AA¹⁷-LYI, ASASPXX:VPQDL:SPIS-AA¹⁷-LYI, NDEGLEX:VPTEE:SPIS-AA¹⁷-LYI, NDEGLEX:VPTGQ:SPIS-AA¹⁷-LYI, SSVKXQP:SRVHH:SPIS-AA¹⁷-LYI, RNVQXRP:TQVQL:SPIS-AA¹⁷-LYI, KIPKAXX:VPTEL:SPIS-AA¹⁷-LFI, GIPEPXX:VPTKM:SPIS-AA¹⁷-LFI, SIPKAXX:VPTEL:SPIS-AA¹⁷-LFI, HVTKPTX:VPTKL:SPIS-AA¹⁷-LFI, YVPKPXX:VPTKL:SPIS-AA¹⁷-LFI, TVPKPXX:VPTQL:SPIS-AA¹⁷-LFI, AVPKAXX:VPTKL:SPIS-AA¹⁷-LFI, KVGKAXX:VPTKL:SPIS-AA¹⁷-LFI, KASKAXX:VPTKL:SPIS-AA¹⁷-LFI, GSAGPXX:VPTKM:SPIS-AA¹⁷-LFI, AAPASXX:VPTRL:SPIS-AA¹⁷-LFI, HVPKPXX:VPTKL:SPIS-AA¹⁷-LFI, RVPSTXX:VPTKT:SPIS-AA¹⁷-LFI, ASAAPXX:VPTAL:SPIS-AA¹⁷-LFI, ASASPXX:VPTDL:SPIS-AA¹⁷-LFI, GIPEPXX:VPEKM:SPIS-AA¹⁷-LFI, HVTKPTX:APTKL:SPIS-AA¹⁷-LFI, YVPKPXX:APTKL:SPIS-AA¹⁷-LFI, TVPKPXX:APTQL:SPIS-AA¹⁷-LFI, AVPKAXX:APTKL:SPIS-AA¹⁷-LFI, GSAGPXX:TPTKM:SPIS-AA¹⁷-LFI, AAPASXX:VPARL:SPIS-AA¹⁷-LFI, HVPKPXX:APTKL:SPIS-AA¹⁷-LFI, RVPSTXX:APVKT:SPIS-AA¹⁷-LFI, ASAAPXX:VPQAL:SPIS-AA¹⁷-LFI, ASASPXX:VSQDL:SPIS-AA¹⁷-LFI, ASASPXX:VPQDL:SPIS-AA¹⁷-LFI, SSVKXQP:SRVHH:SPIS-AA¹⁷-LFI, RNVQXRP:TQVQL:SPIS-AA¹⁷-LFI, KIPKAXX:APVEL:KPLS-AA¹⁷-LYV, GIPEPXX:APVKM:KPLS-AA¹⁷-LYV, SIPKAXX:APVEL:KPLS-AA¹⁷-LYV, HVTKPTX:APVKL:KPLS-AA¹⁷-LYV, YVPKPXX:APVKL:KPLS-AA¹⁷-LYV, TVPKPXX:APVQL:KPLS-AA¹⁷-LYV, AVPKAXX:APVKL:KPLS-AA¹⁷-LYV, KVGKAXX:APVKL:KPLS-AA¹⁷-LYV, KASKAXX:APVKL:KPLS-AA¹⁷-LYV, GSAGPXX:APVKM:KPLS-AA¹⁷-LYV, AAPASXX:APVRL:KPLS-AA¹⁷-LYV, STPPTXX:APVRL:KPLS-AA¹⁷-LYV, HVPKPXX:APVKL:KPLS-AA¹⁷-LYV, ASAAPXX:APVAL:KPLS-AA¹⁷-LYV, ASASPXX:APVDL:KPLS-AA¹⁷-LYV, KIPKAXX:VPTEL:KPLS-AA¹⁷-LYV, GIPEPXX:VPEKM:KPLS-AA¹⁷-LYV, SIPKAXX:VPTEL:KPLS-AA¹⁷-LYV, HVTKPTX:APTKL:KPLS-AA¹⁷-LYV, YVPKPXX:APTKL:KPLS-AA¹⁷-LYV, TVPKPXX:APTQL:KPLS-AA¹⁷-LYV, AVPKAXX:APTKL:KPLS-AA¹⁷-LYV, KVGKAXX:VPTKL:KPLS-AA¹⁷-LYV, KASKAXX:VPTKL:KPLS-AA¹⁷-LYV, GSAGPXX:TPTKM:KPLS-AA¹⁷-LYV, AAPASXX:VPARL:KPLS-AA¹⁷-LYV, STPPTXX:VPTRL:KPLS-AA¹⁷-LYV, HVPKPXX:APTKL:KPLS-AA¹⁷-LYV, ASAAPXX:VPQAL:KPLS-AA¹⁷-LYV, ASASPXX:VSQDL:KPLS-AA¹⁷-LYV, ASASPXX:VPQDL:KPLS-AA¹⁷-LYV, NDEGLEX:VPTEE:KPLS-AA¹⁷-LYV, NDEGLEX:VPTGQ:KPLS-AA¹⁷-LYV, SSVKXQP:SRVHH:KPLS-AA¹⁷-LYV, RNVQXRP:TQVQL:KPLS-AA¹⁷-LYV, KIPKAXX:VPQEL:EPLP-AA¹⁷-VYY, GIPEPXX:VPQKM:EPLP-AA¹⁷-VYY, SIPKAXX:VPQEL:EPLP-AA¹⁷-VYY, HVTKPTX:VPQKL:EPLP-AA¹⁷-VYY, YVPKPXX:VPQKL:EPLP-AA¹⁷-VYY, TVPKPXX:VPQQL:EPLP-AA¹⁷-VYY, AVPKAXX:VPQKL:EPLP-AA¹⁷-VYY, KVGKAXX:VPQKL:EPLP-AA¹⁷-VYY, KASKAXX:VPQKL:EPLP-AA¹⁷-VYY, GSAGPXX:VPQKM:EPLP-AA¹⁷-VYY, AAPASXX:VPQRL:EPLP-AA¹⁷-VYY, STPPTXX:VPQRL:EPLP-AA¹⁷-VYY, HVPKPXX:VPQKL:EPLP-AA¹⁷-VYY, RVPSTXX:VPQKT:EPLP-AA¹⁷-VYY, ASASPXX:VPQDL:EPLP-AA¹⁷-VYY, KIPKAXX:VPTEL:EPLP-AA¹⁷-VYY, GIPEPXX:VPEKM:EPLP-AA¹⁷-VYY, SIPKAXX:VPTEL:EPLP-AA¹⁷-VYY, HVTKPTX:APTKL:EPLP-AA¹⁷-VYY, YVPKPXX:APTKL:EPLP-AA¹⁷-VYY, TVPKPXX:APTQL:EPLP-AA¹⁷-VYY, AVPKAXX:APTKL:EPLP-AA¹⁷-VYY, KVGKAXX:VPTKL:EPLP-AA¹⁷-VYY, KASKAXX:VPTKL:EPLP-AA¹⁷-VYY, GSAGPXX:TPTKM:EPLP-AA¹⁷-VYY, AAPASXX:VPARL:EPLP-AA¹⁷-VYY, STPPTXX:VPTRL:EPLP-AA¹⁷-VYY, HVPKPXX:APTKL:EPLP-AA¹⁷-VYY, RVPSTXX:APVKT:EPLP-AA¹⁷-VYY, ASASPXX:VSQDL:EPLP-AA¹⁷-VYY, NDEGLEX:VPTEE:EPLP-AA¹⁷-VYY, NDEGLEX:VPTGQ:EPLP-AA¹⁷-VYY, SSVKXQP:SRVHH:EPLP-AA¹⁷-VYY, RNVQXRP:TQVQL:EPLP-AA¹⁷-VYY, KIPKAXX:VSQEL:EPLT-AA¹⁷-LYY, GIPEPXX:VSQKM:EPLT-AA¹⁷-LYY, SIPKAXX:VSQEL:EPLT-AA¹⁷-LYY, HVTKPTX:VSQKL:EPLT-AA¹⁷-LYY, YVPKPXX:VSQKL:EPLT-AA¹⁷-LYY, TVPKPXX:VSQQL:EPLT-AA¹⁷-LYY, AVPKAXX:VSQKL:EPLT-AA¹⁷-LYY, KVGKAXX:VSQKL:EPLT-AA¹⁷-LYY, KASKAXX:VSQKL:EPLT-AA¹⁷-LYY, GSAGPXX:VSQKM:EPLT-AA¹⁷-LYY, AAPASXX:VSQRL:EPLT-AA¹⁷-LYY, STPPTXX:VSQRL:EPLT-AA¹⁷-LYY, HVPKPXX:VSQKL:EPLT-AA¹⁷-LYY, RVPSTXX:VSQKT:EPLT-AA¹⁷-LYY, ASAAPXX:VSQAL:EPLT-AA¹⁷-LYY, ASASPXX:VSQDL:EPLT-AA¹⁷-LYY, KIPKAXX:VPTEL:EPLT-AA¹⁷-LYY, GIPEPXX:VPEKM:EPLT-AA¹⁷-LYY, SIPKAXX:VPTEL:EPLT-AA¹⁷-LYY, HVTKPTX:APTKL:EPLT-AA¹⁷-LYY, YVPKPXX:APTKL:EPLT-AA¹⁷-LYY, TVPKPXX:APTQL:EPLT-AA¹⁷-LYY, AVPKAXX:APTKL:EPLT-AA¹⁷-LYY, KVGKAXX:VPTKL:EPLT-AA¹⁷-LYY, KASKAXX:VPTKL:EPLT-AA¹⁷-LYY, GSAGPXX:TPTKM:EPLT-AA¹⁷-LYY, AAPASXX:VPARL:EPLT-AA¹⁷-LYY, STPPTXX:VPTRL:EPLT-AA¹⁷-LYY, HVPKPXX:APTKL:EPLT-AA¹⁷-LYY, RVPSTXX:APVKT:EPLT-AA¹⁷-LYY, ASAAPXX:VPQAL:EPLT-AA¹⁷-LYY, NDEGLEX:VPTEE:EPLT-AA¹⁷-LYY, NDEGLEX:VPTGQ:EPLT-AA¹⁷-LYY, SSVKXQP:SRVHH:EPLT-AA¹⁷-LYY, RNVQXRP:TQVQL:EPLT-AA¹⁷-LYY, KIPKAXX:VPQEL:EPLT-AA¹⁷-LYY, GIPEPXX:VPQKM:EPLT-AA¹⁷-LYY, SIPKAXX:VPQEL:EPLT-AA¹⁷-LYY, HVTKPTX:VPQKL:EPLT-AA¹⁷-LYY, YVPKPXX:VPQKL:EPLT-AA¹⁷-LYY, TVPKPXX:VPQQL:EPLT-AA¹⁷-LYY, AVPKAXX:VPQKL:EPLT-AA¹⁷-LYY, KVGKAXX:VPQKL:EPLT-AA¹⁷-LYY, KASKAXX:VPQKL:EPLT-AA¹⁷-LYY, GSAGPXX:VPQKM:EPLT-AA¹⁷-LYY, AAPASXX:VPQRL:EPLT-AA¹⁷-LYY, STPPTXX:VPQRL:EPLT-AA¹⁷-LYY, HVPKPXX:VPQKL:EPLT-AA¹⁷-LYY, RVPSTXX:VPQKT:EPLT-AA¹⁷-LYY, ASASPXX:VPQDL:EPLT-AA¹⁷-LYY, NDEGLEX:VPTGQ:SNIT-AA¹⁷-QIM, GIPEPXX:VPEKM:SNIT-AA¹⁷-QIM, HVTKPTX:APTKL:SNIT-AA¹⁷-QIM, YVPKPXX:APTKL:SNIT-AA¹⁷-QIM, TVPKPXX:APTQL:SNIT-AA¹⁷-QIM, AVPKAXX:APTKL:SNIT-AA¹⁷-QIM, GSAGPXX:TPTKM:SNIT-AA¹⁷-QIM, AAPASXX:VPARL:SNIT-AA¹⁷-QIM, HVPKPXX:APTKL:SNIT-AA¹⁷-QIM, RVPSTXX:APVKT:SNIT-AA¹⁷-QIM, ASAAPXX:VPQAL:SNIT-AA¹⁷-QIM, ASASPXX:VSQDL:SNIT-AA¹⁷-QIM, ASASPXX:VPQDL:SNIT-AA¹⁷-QIM, SSVKXQP:SRVHH:SNIT-AA¹⁷-QIM, RNVQXRP:TQVQL:SNIT-AA¹⁷-QIM, RNVQXRP:SRVQL:RSVK-AA¹⁷-AKV, KIPKAXX:VPTEL:RSVK-AA¹⁷-AKV, GIPEPXX:VPEKM:RSVK-AA¹⁷-AKV, SIPKAXX:VPTEL:RSVK-AA¹⁷-AKV, HVTKPTX:APTKL:RSVK-AA¹⁷-AKV, YVPKPXX:APTKL:RSVK-AA¹⁷-AKV, TVPKPXX:APTQL:RSVK-AA¹⁷-AKV, AVPKAXX:APTKL:RSVK-AA¹⁷-AKV, KVGKAXX:VPTKL:RSVK-AA¹⁷-AKV, KASKAXX:VPTKL:RSVK-AA¹⁷-AKV, GSAGPXX:TPTKM:RSVK-AA¹⁷-AKV, AAPASXX:VPARL:RSVK-AA¹⁷-AKV, STPPTXX:VPTRL:RSVK-AA¹⁷-AKV, HVPKPXX:APTKL:RSVK-AA¹⁷-AKV, RVPSTXX:APVKT:RSVK-AA¹⁷-AKV, ASAAPXX:VPQAL:RSVK-AA¹⁷-AKV, ASASPXX:VSQDL:RSVK-AA¹⁷-AKV, ASASPXX:VPQDL:RSVK-AA¹⁷-AKV, NDEGLEX:VPTEE:RSVK-AA¹⁷-AKV, NDEGLEX:VPTGQ:RSVK-AA¹⁷-AKV, RNVQXRP:TQVQL:RSVK-AA¹⁷-AKV, SSVKXQP:TQVHH:RPVQ-AA¹⁷-RKI, KIPKAXX:VPTEL:RPVQ-AA¹⁷-RKI, GIPEPXX:VPEKM:RPVQ-AA¹⁷-RKI, SIPKAXX:VPTEL:RPVQ-AA¹⁷-RKI, HVTKPTX:APTKL:RPVQ-AA¹⁷-RKI, YVPKPXX:APTKL:RPVQ-AA¹⁷-RKI, TVPKPXX:APTQL:RPVQ-AA¹⁷-RKI, AVPKAXX:APTKL:RPVQ-AA¹⁷-RKI, KVGKAXX:VPTKL:RPVQ-AA¹⁷-RKI, KASKAXX:VPTKL:RPVQ-AA¹⁷-RKI, GSAGPXX:TPTKM:RPVQ-AA¹⁷-RKI, AAPASXX:VPARL:RPVQ-AA¹⁷-RKI, STPPTXX:VPTRL:RPVQ-AA¹⁷-RKI, HVPKPXX:APTKL:RPVQ-AA¹⁷-RKI, RVPSTXX:APVKT:RPVQ-AA¹⁷-RKI, ASAAPXX:VPQAL:RPVQ-AA¹⁷-RKI, ASASPXX:VSQDL:RPVQ-AA¹⁷-RKI, ASASPXX:VPQDL:RPVQ-AA¹⁷-RKI, NDEGLEX:VPTEE:RPVQ-AA¹⁷-RKI, NDEGLEX:VPTGQ:RPVQ-AA¹⁷-RKI and SSVKXQP:SRVHH:RPVQ-AA¹⁷-RKI; and wherein AA¹⁷ is selected from the group consisting of G, A, V, L, I, P, F, M, W, T and S (in particular is selected from the group consisting of M, I, L, V and T).

[0274] In one example, said cyclic GFR-binding compound is a synthetic molecule as defined herein in the definition section.

[0275] In one particular example, said cyclic GFR-binding compound is a synthetic peptide, or a variant or analog thereof, or a cyclic peptidomimetic.

[0276] In one example, a length of said cyclic GFR-binding compound, in solution, such as in a physiologically acceptable solvent such as water or PBS, is comprised between about 6 and about 20 nm, preferably between about 6 and about 16 nm, as determined using the standard «3D» procedure described above.

[0277] In one particular example, said cyclic GFR-binding compounds may be any one of peptides of SEQ ID NO: 1 to 12519.

[0278] LINKER

[0279] In one particular example, said LINKER has a Mw comprised between 450 and 4,500 Daltons, in particular comprised between about 600 and about 4,500 Da, more particularly between about 600 and about 4,000 Da, and even more particularly between about 600 and about 3,500 Da.

[0280] The chemical nature of said LINKER is not meant to be particularly limited and may be any organic molecule capable of covalently connecting two ends of a peptide or a peptidomimetic such as PEP(A) or PEP(C)-PEP12 so as to form a cyclic compound and so long as LINKER provides sufficient cycle stability to provide or conserve the required tissue regeneration activity. LINKER may thus be, for example, in certain embodiments, a peptide, or variant, analog or peptidomimetic thereof, a polysaccharide, a polynucleotide, a saturated or unsaturated hydrocarbon chain, or a mixture thereof.

[0281] For example, in certain embodiments, LINKER is a peptide with 6 to 31 amino acids. In one particular example, LINKER is a peptide with 6 to 25 amino acids. In one particular example, LINKER is a peptide with 8 to 25 amino acids. In one most particular example, LINKER is a peptide with 8 to 20 amino acids.

[0282] Thus, in one particular example, said cyclic GFR-binding compound is a peptide, a variant or analog thereof as defined herein, with between 10-60 (in particular between 15-60, more particularly between 10-55, and even more particularly between 15-55) amino acids or with between 10-35 (in particular between 15-35, more particularly between 10-30, and even more particularly between 15-30) amino acids, comprising a peptide, a variant or analog thereof of general formula (I); wherein one end of LINKER interacts covalently with one end of PEP(A); wherein PEP(A) comprises PEP1 or PEP12; wherein LINKER is a peptide comprising 6 to 31 amino acids (in particular 6 to 25, 8 to 25, or 8 to 20 amino acids).

[0283] Thus, in one particular example, said cyclic GFR-binding compound is a peptide, a variant or analog thereof as defined herein, with between 10-60 (in particular between 15-60, more particularly between 10-55, and even more particularly between 15-55) amino acids or with between 10-35 (in particular between 15-35, more particularly between 10-30, and even more particularly between 15-30) amino acids, comprising a peptide, a variant or analog thereof of general formula (II); wherein LINKER is a peptide comprising 6 to 31 amino acids (in particular 6 to 25, 8 to 25, or 8 to 20 amino acids); wherein PEP12 is a peptide with 8 amino acids of formula PEP1-AA¹⁷-PEP11 as already defined herein; wherein PEP1, PEP11 and PEP(C) are as already defined herein; wherein AA¹³ may be an N-terminal amino acid or a C-terminal amino acids; wherein AA²⁰ may be an N-terminal amino acid or a C-terminal amino acid; wherein one end of LINKER interacts covalently with one end of PEP12 via AA²⁰; wherein another end of LINKER interacts covalently with one end of PEP(C); wherein another end of PEP(C) interacts covalently with PEP12 via AA¹³.

[0284] Thus, in one particular example, said cyclic GFR-binding compound is a peptide, a variant or analog thereof as defined herein, with between 10-60 (in particular between 15-60, more particularly between 10-55, and even more particularly between 15-55) amino acids or with between 10-35 (in particular between 15-35, more particularly between 10-30, and even more particularly between 15-30) amino acids, having any one of the general formula (V) to (XXI); wherein LINKER is a peptide comprising 6 to 31 amino acids (in particular 6 to 25, 8 to 25, or 8 to 20 amino acids).

[0285] In certain embodiments, said cyclic GFR-binding compound is a cyclic peptidomimetic as defined herein, with between 10-60 (in particular between 15-60, more particularly between 10-55, and even more particularly between 15-55) amino acids or with between 10-35 (in particular between 15-35, more particularly between 10-30, and even more particularly between 15-30) amino acids, of general formula (II); wherein LINKER is not a peptide but may comprise amino acids or peptides in covalent or non-covalent (preferably covalent) association with other groups or residues other than amino acids or peptides.

[0286] In one particular example, LINKER comprises (or is) a peptide of general formula (XXII):

*AA²⁰¹-AA²⁰²-AA²⁰³-AA²⁰⁴-AA²⁰⁵-AA²⁰⁶-AA²⁰⁷-AA²⁰⁸-AA²⁰⁹** (XXII)

[0287] wherein said peptide of formula (XXII) may be selected from the group consisting of *AA^{III}-AA^{I}-AA^{I}-AA^{II}-AA^{VII}-AA^{XII}-AA^{XII}-AA^{XIII}-AA^{XIII}**, *AA^{III}-AA^{I}-AA^{VI}-AA^{II}-AA^{VII}-AA^{XII}-AA^{XIII}-AA^{XIII}**, *AA^{III}-AA^{I}-AA^{I}-AA^{II}-AA^{II}-AA^{XII}-AA^{XII}-AA^{XIII}-AA^{XIII}**, *AA^{III}-AA^{I}-AA^{II}-AA^{II}-AA^{VII}-AA^{XII}-AA^{XII}-AA^{XIII}-AA^{XIII}**, *AA^{III}-AA^{I}-AA^{II}-AA^{II}-AA^{IV}-AA^{IV}-AA^{XII}-AA^{XII}-AA^{XIII}-AA^{XIII}**, *AA^{II}-AA^{I}-AA^{II}-AA^{II}-AA^{II}-AA^{XII}-AA^{XII}-AA^{XIII}-AA^{XIII}**, *AA^{III}-AA^{III}-AA^{II}-AA^{VII}-AA^{II}-AA^{XII}-AA^{XIII}-AA^{XIII}**, *AA^{VIII}-AA^{V}-AA^{VII}-AA^{II}-AA^{XII}-AA^{XII}-AA^{XIII}-AA^{XIII}**, *AA^{V}-AA^{V}-AA^{VII}-AA^{VII}-AA^{XII}-AA^{XII}-AA^{XII}-AA^{XIII}**, *AA^{VIII}-AA^{V}-AA^{VII}-AA^{II}-AA^{XII}-AA^{XII}-AA^{XIII}-AA^{XIII}** and *AA^{V}-AA^{V}-AA^{VII}-AA^{II}-AA^{XII}-AA^{XII}-AA^{XIII}-AA^{XIII}**; wherein AA^{I} is any amino acid as defined herein, AA^{II} is any polar amino acid as defined herein, AA^{III} is any acidic amino acid as defined herein, AA^{IV} is any aliphatic amino acid as defined herein, AA^{V} is any apolar amino acid as defined herein, AA^{VI} is any aromatic amino acid as defined herein, AA^{VII} is any basic amino acid as defined herein, AA^{VIII} is L or I as defined herein, AA^{XII} is an amino acid selected from the group consisting of G, A, V, L, I, P, M, K, R, H, Y and E, wherein AA^{XIII} is absent, AA^{III} or AA^{VII}, preferably absent; and wherein any one of the fragment AA²⁰¹, AA²⁰¹-AA²⁰², AA²⁰¹-AA²⁰²-AA²⁰³, AA²⁰¹-AA²⁰²-AA²⁰³-AA²⁰⁴, AA²⁰¹-AA²⁰²-AA²⁰³-AA²⁰⁴-AA²⁰⁵, AA²⁰¹-AA²⁰²-AA²⁰³-AA²⁰⁴-AA²⁰⁵-AA²⁰⁶, AA²⁰¹-AA²⁰²-AA²⁰³-AA²⁰⁴-AA²⁰⁵-AA²⁰⁶-AA²⁰⁷-AA²⁰³-AA²⁰⁴-AA²⁰⁵-AA²⁰⁶-AA²⁰⁷-AA²⁰⁸-AA²⁰⁹-AA²⁰⁴AA²⁰⁵-AA²⁰⁶-AA²⁰⁷-AA²⁰⁸-AA²⁰⁹, AA²⁰⁵-AA²⁰⁶-AA²⁰⁷-AA²⁰⁸-AA²⁰⁹, AA²⁰⁶-AA²⁰⁷-AA²⁰⁸-AA²⁰⁹, AA²⁰⁷-AA²⁰⁸-AA²⁰⁹, AA²⁰⁸-AA²⁰⁹ or AA²⁰⁹, may be absent. In the peptides of formula (XXII), any one of the amino acid labelled “*” or the amino acid labelled “**” is an N-terminal amino acid and the other is a C-terminal amino acid.

[0288] For instance, in the peptide of formula *AA^{III}-AA^{I}-AA^{I}-AA^{II}-AA^{VII}-AA^{XII}-AA^{XII}-AA^{XIII}-AA^{XIII}** (XXII-1), AA^{III} occupies position AA²⁰¹, *AA^{I} occupies position AA²⁰², AA^{I} occupies position AA²⁰³, AA^{II} occupies position AA²⁰⁴, AA^{VII} occupies position AA²⁰⁵, AA^{XII} occupies position AA²⁰⁶, AA^{XII} occupies position AA²⁰⁷, AA^{XIII} occupies position AA²⁰⁸ and AA^{XIII}** occupies position AA²⁰⁹.

[0289] Likewise, in the peptide of formula *AA^{V}-AA^{V}-AA^{VII}-AA^{II}-AA^{XII}-AA^{XII}-AA^{XIII}** (XXII-1) AA^{V} occupies position AA²⁰¹, AA^{V} occupies position AA²⁰², AA^{VII} occupies position AA²⁰³, AA^{II} occupies position AA²⁰⁴, AA^{XII} occupies position AA²⁰⁵, AA^{XII} occupies position AA²⁰⁶, AA^{XIII} occupies position AA²⁰⁷, AA^{XIII} occupies position AA²⁰⁸ and position AA²⁰⁹ is vacants.

[0290] In one example, LINKER may thus comprise or be any one of the following peptides: *AA²⁰¹-AA²⁰²-AA²⁰³-AA²⁰⁴-AA²⁰⁵-AA²⁰⁶-AA²⁰⁷-AA²⁰⁸** (XXII-1); *AA²⁰¹-AA²⁰²-AA²⁰³-AA²⁰⁴-AA²⁰⁵-AA²⁰⁶-AA²⁰⁷** (XXII-2); *AA²⁰¹-AA²⁰²-AA²⁰³-AA²⁰⁴-AA²⁰⁵-AA²⁰⁶** (XXII-3); *AA²⁰¹-AA²⁰²-AA²⁰³-AA²⁰⁴-AA²⁰⁵** (XXII-4); *AA²⁰¹-AA²⁰²-AA²⁰³-AA²⁰⁴** (XXII-5); *AA²⁰¹-AA²⁰²-AA²⁰³** (XXII-6); *AA²⁰¹-AA²⁰²** (XXII-7); *AA²⁰²-AA²⁰³-AA²⁰⁴-AA²⁰⁵-AA²⁰⁶-AA²⁰⁷-AA²⁰⁸-AA²⁰⁹** (XXII-8); *AA²⁰³-AA²⁰⁴-AA²⁰⁵-AA²⁰⁶-AA²⁰⁷-AA²⁰⁸-AA²⁰⁹** (XXII-9); *AA²⁰⁴-AA²⁰⁵-AA²⁰⁶-AA²⁰⁷-AA²⁰⁸-AA²⁰⁹** (XXII-10); *AA²⁰⁵-AA²⁰⁶-AA²⁰⁷-AA²⁰⁸-AA²⁰⁹** (XXII-11); *AA²⁰⁶-AA²⁰⁷-AA²⁰⁸-AA²⁰⁹** (XXII-12); *AA²⁰⁷-AA²⁰⁸-AA²⁰⁹** (XXII-13); *AA²⁰⁸-AA²⁰⁹** (XXII-14); wherein, for instance, said peptide of formulae (XXII-1) may thus be selected from the group consisting of *AA^{III}-AA^{I}-AA^{I}-AA^{II}-AA^{VII}-AA^{XII}-AA^{XIII}**, *AA^{III}-AA^{I}-AA^{VI}-AA^{II}-AA^{VII}-AA^{XII}-AA^{XIII}-AA^{XIII}**, *AA^{III}-AA^{I}-AA^{I}-AA^{II}-AA^{II}-AA^{XII}-AA^{XII}-AA^{XIII}**, *AA^{III}-AA^{I}-AA^{II}-AA^{II}-AA^{VII}-AA^{XII}-AA^{XII}-AA^{XIII}**, *AA^{III}-AA^{I}-AA^{II}-AA^{IV}-AA^{IV}-AA^{XII}-AA^{XII}-AA^{XIII}**, *AA^{II}-AA^{I}-AA^{II}-AA^{II}-AA^{II}-AA^{XII}-AA^{XII}-AA^{XIII}**, *AA^{III}-AA^{III}-AA^{II}-AA^{VII}-AA^{II}-AA^{XII}-AA^{XII}-AA^{XIII}**, *AA^{III}-AA^{XIII}-AA^{XIII}**, *AA^{VIII}-AA^{V}-AA^{VII}-AA^{II}-AA^{XII}-AA^{XII}-AA^{XIII}-AA^{XIII}**, *AA^{V}-AA^{V}-AA^{VII}-AA^{VII}-AA^{XII}-AA^{XII}-AA^{I}-AA^{I}-AA^{II}-AA^{II}-AA^{XII}-AA^{XII}-AA^{XIII}**, *AA^{V}-AA^{V}-AA^{VII}-AA^{VII}-AA^{XII}-AA^{XII}-AA^{XIII}**, *AA^{VIII}-AA^{V}-AA^{VII}-AA^{II}-AA^{XII}-AA^{XII}-AA^{XIII}** and *AA^{V}-AA^{V}-AA^{VII}-AA^{II}-AA^{XII}-AA^{XIII}**.

[0291] In one particular example, LINKER comprises a peptide of formula (XXII), (XXII-2) or (XXII-4).

[0292] In one example, LINKER comprises (or is) a poly-(aliphatic amino acid) peptide such as poly-alanine peptide (A)ₙ, or a poly-glycine (G)ₙ, n being an integer comprised between 2 and 31, in particular between 2 to 25, more particularly between 2 and 20, such as A-A-A-A-A-A-A-A-A, A-A-A-A-A-A-A, A-A-A-A-A, G-G-G-G-G-G-G-G-G, G-G-G-G-G-G-G or G-G-G-G-G.

[0293] In one particular example, LINKER comprises (or is) a peptide of general formulae (XXII) to (XXII-14), more particularly (XXII), (XXII-2) or (XXII-4), and/or a poly-(aliphatic amino acid), peptide as defined herein.

[0294] For example, in certain embodiments, LINKER is a polysaccharide comprising 6 to 31 saccharides. In one particular example, LINKER is a polysaccharide comprising 6 to 25 saccharides. In one particular example, LINKER is a polysaccharide comprising 8 to 25 saccharides. In one most particular example, LINKER is a polysaccharide comprising 8 to 20 saccharides. Suitable monosaccharides include, but are not limited to, glucose (dextrose), fructose (levulose) and galactose. Monosaccharides are the building blocks of disaccharides (such as sucrose) and polysaccharides (such as celluloses, chitosans, ulvanes and starches). Further, each carbon atom that supports a hydroxyl group (except for the first and last) is chiral, giving rise to a number of isomeric forms all with the same chemical formula. A large number of biologically important modified monosaccharides exists e.g. amino sugars such as Galactosamine, Glucosamine, Sialic acid, N-Acetylglucosamine, and sulfosugars such as Sulfoquinovose. All of these monosaccharide and polysaccharide derivatives may be used as LINKER in the present invention.

[0295] For example, in certain embodiments, LINKER is a polynucleotide comprising 6 to 31 nucleotides. In one particular example, LINKER is a polynucleotide comprising 6 to 25 nucleotides. In one particular example, LINKER is a polynucleotide comprising 8 to 25 nucleotides. In one most particular example, LINKER is a polynucleotide comprising 8 to 20 nucleotides. Suitable nucleotides include adenine (A), guanine (G), thymine (T), cytosine (C), uracil (U) and derivatives, analogues and/or mimetic thereof.

[0296] For example, in certain embodiments, LINKER is a saturated or unsaturated hydrocarbon chain comprising between 16 and 60, between 16 and 45, or between 16 and 30 carbon atoms, wherein said hydrocarbon chain is optionally interrupted by one or more non-carbon atom, preferably between 1 and 16, between 1 and 12 or between 1 and 8 non-carbon atoms as appropriate, wherein said non-carbon atom is selected from the group consisting of —O—, —S—, —C(═O), —SO₂—, —N(Ri)(C═O)—, and —N(Ri)-, wherein Ri is selected from the group consisting of a hydrogen atom, a C1-C6 alkyl group and an aryl group, and wherein said hydrocarbon chain is non-substituted or substituted by at least one radical selected from the group consisting of a halogen, a monosaccharide, a poly(1-6)saccharide, a nucleotide, a poly(1-6)nucleotide, a C1-C10 alkyl group and an aryl group.

[0297] In one example, LINKER is a saturated or unsaturated hydrocarbon chain of at most 10 nanometres (nm) in length, preferably at most 144 nanometres (nm) in length, in particular at most 120 nm, 96 nm, 84 nm or 72 nm as determined using the standard «2D» procedure described above.

[0298] In one example, such saturated or unsaturated hydrocarbon chains include polyethylene glycol (PEG) or any one of its derivatives.

[0299] More particularly, LINKER is a octapeptide (8 amino acids). More particularly, LINKER is a nonapeptide (9 amino acids). More particularly, LINKER is a decapeptide (10 amino acids). More particularly, LINKER is a hendecapeptide (11 amino acids). More particularly, LINKER is a dodecapeptide (12 amino acids). More particularly, LINKER is a tridecapeptideo (13 amino acids). More particularly, LINKER is a tetradecapeptide (14 amino acids). More particularly, LINKER is a pentadecapeptide (15 amino acids). More particularly, LINKER is a hexadecapeptide (16 amino acids). More particularly, LINKER is a heptadecapeptide (17 amino acids). More particularly, LINKER is an octadecapeptide (18 amino acids). More particularly, LINKER is an enneadecapeptide (19 amino acids). More particularly, LINKER is an icosapeptide (20 amino acids).

[0300] In one particular example, LINKER comprises one or more of a peptide selected from the group consisting of DENEKVV, DENKNVV, DEYDKVV, DDSSNVI, DSSNNVI, DDMGVPT, DKGVVTY, NDKQQII, DAANNVV, DSANNVV, DDSSNVI, DNGRVLL, VGRKPKV, IGKTPKI, VGRTPKV, RIKPHQGQH, EYVRKKPKL, EIVRKKPIF, EYVRKKP, EIVRKKP, polyalanine (A₁₋₁₂) (preferably A₂₋₈) and polyglycine (G₁₋₁₂) (preferably Gₘ).

[0301] For example, in certain embodiments, to synthetise cyclic GFR-binding compounds of the present disclosure, the covalent bonds between e.g. LINKER, PEP(A), PEP(C) or PEP1 to PEP12, may be created through the chemical reaction between a free amine moiety e.g. of a N-terminal amino acid (—NH₂ or —NH₃X, X generally being a halide anion selected from the group consisting of F⁻, Cl⁻ and Br⁻), typically acting as a nucleophile, and an electrophile moiety of e.g. a C-terminal amino acid. Such an electrophile moiety includes, but is not limited to, alkyl halides (—CR₂—X), alcohols (—CR₂—OH), acid chlorides (—C(═O)X), esters, (—C(═O)OR), phosphate (—OP(OR)₃), phosphinate (—OP(OR)R₂), phosphonates (—OP(OR)₂R), phosphonite (—P(OR)₂R) or sulfonic esters (—SO₂OR). More particularly, this covalent bond is an amide bond (in particular a peptide bond) formed through conventional peptide synthesis using conventional coupling reagents as already defined herein.

[0302] For example, in certain embodiments, to synthetise cyclic GFR-binding compounds of the present disclosure, the covalent bonds between e.g. LINKER, PEP(A), PEP(C) or PEP1 to PEP12, may be created through the chemical reaction between a free carboxylic acid moiety e.g. of a C-terminal amino acid (—CO₂H or —CO₂X, X generally being an inorganic cation such as alkaline cations (e.g. Li⁺, Na⁺ or K⁺) or an organic cation such as ammonium cations), typically acting as an electrophile, and a nucleophile moiety of e.g. an N-terminal amino acid. Such a nucleophile moiety includes, but is not limited to, alcohols (—OH), amines (—NH₂), phosphines (—PR₃), thiols (—SH). More particularly, this covalent interaction is a peptide bond formed through conventional peptide synthesis using conventional coupling reagents as already defined herein.

[0303] Cyclisation of a cyclic GFR-binding compound of the present disclosure may be carried out as described above using conventional peptide bond formation procedures, click chemistry, formation of disulphide bonds, etc.

[0304] Bone

[0305] Certain embodiments of the invention are particularly useful for inducing differentiation of mensenchymal or progenitor stem cells from the bone cell lineage, regenerating bone tissues, repairing bone and protecting from osteoporosis.

[0306] In certain embodiments useful for inducing differentiation of mensenchymal or progenitor stem cells from the bone cell lineage, regenerating bone tissues, repairing bone and protecting from osteoporosis, PEP1 is selected from the group consisting of SAIS, NAIS, SATS and SPIS.

[0307] In certain embodiments useful for inducing differentiation of mensenchymal or progenitor stem cells from the bone cell lineage, regenerating bone tissues, repairing bone and protecting from osteoporosis, PEP3 is selected from the group consisting of VPT, APT, VPQ, VSQ and TQV.

[0308] In certain embodiments useful for inducing differentiation of mensenchymal or progenitor stem cells from the bone cell lineage, regenerating bone tissues, repairing bone and protecting from osteoporosis, PEP5 is a peptide of general formula PEP3-AA¹¹-AA¹²; wherein PEP3 is selected from the group consisting of VPT, APT, VPQ, VSQ and TQV; wherein AA¹¹ is selected from the group consisting of E, K, Q, R, A, D, G and H, in particular E, K, Q, A and D; wherein AA¹² is selected from the group consisting of L, M, T, E, Q and H, in particular L. In one particular example, PEP5 is selected from the group consisting of VPTEL, APTKL, APTKL, VPTKL, VPQAL, VSQDL, VPQDL and TQVQL.

[0309] In certain embodiments useful for inducing differentiation of mensenchymal or progenitor stem cells from the bone cell lineage, regenerating bone tissues, repairing bone and protecting from osteoporosis, PEP7 is an amino acid or a peptide with between two and seven amino acids of general formula AA¹-AA²-AA³-AA⁴-AA⁵-AA⁶-AA⁷; wherein AA¹, AA², AA³, AA⁴, and AA⁵ are independently absent or AA^{I} as defined herein; wherein AA⁶ is absent or selected from the group consisting of S, T, C, E, Q, P and R, preferably C, S, T or R; wherein AA⁷ is absent or is selected from the group consisting of S, T, C, E, Q, P and R, preferably is selected from the group consisting of C, S and P; and wherein at least one of AA¹, AA², AA³, AA⁴, AA⁵, AA⁶ or AA⁷ is not absent. In one particular example, PEP7 is selected from the group consisting of KIPKAXX, SIPKAXX, HVTKPTX, YVPKPXX, TVPKPXX, AVPKAXX, KVGKAXX, ASAAPXX, ASASPXX and RNVQXRP.

[0310] In certain embodiments useful for inducing differentiation of mensenchymal or progenitor stem cells from the bone cell lineage, regenerating bone tissues, repairing bone and protecting from osteoporosis, PEP9 is a peptide of general formula AA¹-AA²-AA³-AA⁴-AA⁵-AA⁶-AA⁷-PEP5; wherein PEP5 is a peptide of formula PEP3-AA¹¹-AA¹²; wherein PEP3 is selected from the group consisting of VPT, APT, VPQ, VSQ and TQV; wherein AA¹¹ is selected from the group consisting of E, K, Q, R, A, D, G and H, in particular E, K, Q, A and D; wherein AA¹² is selected from the group consisting of L, M, T, E, Q and H, in particular L; wherein AA¹, AA², AA³, AA⁴, and AA⁵ are independently absent or AA^{I} as defined herein; wherein AA⁶ is absent or selected from the group consisting of S, T, C, E, Q, P and R, preferably C, S, T or R; wherein AA⁷ is selected from the group consisting of S, T, C, E, Q, P and R, preferably is selected from the group consisting of C, S and P. In one particular example, PEP9 is selected from the group consisting of KIPKAXXVPTEL, SIPKAXXVPTEL, HVTKPTXAPTKL, YVPKPXXAPTKL, TVPKPXXAPTQL, AVPKAXXAPTKL, KVGKAXXVPTKL, ASAAPXXVPQAL, ASASPXXVSQDL, ASASPXXVPQDL and RNVQXRPTQVQL.

[0311] In certain embodiments useful for inducing differentiation of mensenchymal or progenitor stem cells from the bone cell lineage, regenerating bone tissues, repairing bone and protecting from osteoporosis, PEP12 is a peptide of general formula PEP1-AA¹⁷-PEP11; wherein AA¹⁷ is selected from the group consisting of G, A, V, L, I, P, F, M, W, T and S (in particular is selected from the group consisting of M, I, L, V and T); wherein PEP1 is selected from the group consisting of SAIS, NAIS, SATS and SPIS.

[0312] In certain embodiments useful for inducing differentiation of mensenchymal or progenitor stem cells from the bone cell lineage, regenerating bone tissues, repairing bone and protecting from osteoporosis, PEP11 is a peptide with 3 amino acids of general formula AA¹⁸, AA¹⁹-AA²⁰; wherein AA¹⁸ is selected from the group consisting of L, V, Q, A and R, in particular is L; wherein AA¹⁹ is selected from the group consisting of F, W, H and Y (in particular is an aromatic, polar amino acid such as Y); wherein AA²⁰ is selected from the group consisting of L, F, Y, K, I, V and M, in particular is selected from the group consisting of L, F, Y, and K. In one particular example, PEP11 is selected from the group consisting of LYL, LYF, LYY and LYK.

[0313] In certain embodiments useful for inducing differentiation of mensenchymal or progenitor stem cells from the bone cell lineage, regenerating bone tissues, repairing bone and protecting from osteoporosis, PEP1 is selected from the group consisting of SAIS, NAIS, SATS and SPIS; PEP11 is selected from the group consisting of LYL, LFF, LYF, LYY, LYK, LYI, LFI, LYV, VYY, QIM, AKV and RKI; and the pair PEP1:PEP11 is selected from the group consisting of SAIS:LYL, NAIS:LYF, SATS:LYY and SPIS:LYK.

[0314] The definitions of “PEP” pairs and triplets e.g. PEP3:PEP1, PEP5:PEP12, or PEP7:PEP5:PEP1, most particularly useful for inducing differentiation of mensenchymal or progenitor stem cells from the bone cell lineage, regenerating bone tissues, repairing bone and protecting from osteoporosis, are as already defined herein to the extent that PEP1, PEP3, PEP5, PEP7, PEP9, PEP11 and PEP12 are particularly useful for these applications as defined in the present bone section.

[0315] In certain embodiments useful for inducing differentiation of mensenchymal or progenitor stem cells from the bone cell lineage, regenerating bone tissues, repairing bone and protecting from osteoporosis, said GFR-binding compound is a synthetic molecule as defined herein in the definition section.

[0316] In certain embodiments useful for inducing differentiation of mensenchymal or progenitor stem cells from the bone cell lineage, regenerating bone tissues, repairing bone and protecting from osteoporosis, said GFR-binding compound is a synthetic peptide, or a variant or analog thereof, or a peptidomimetic.

[0317] Cartilage

[0318] Certain embodiments of the invention are particularly useful for inducing differentiation of mensenchymal or progenitor stem cells from the cartilage cell lineage, regenerating cartilage tissues, repairing cartilage and protecting from, for instance, osteoarthritis, costochondritis, Herniation, achondroplasia or relapsing polychondritis.

[0319] In certain embodiments useful for inducing differentiation of mensenchymal or progenitor stem cells from the cartilage cell lineage, regenerating cartilage tissues, repairing cartilage and protecting from, for instance, osteoarthritis, costochondritis, Herniation, achondroplasia or relapsing polychondritis, PEP1 is selected from the group consisting of SAIS, NAIS, SPIS, EPLP and EPLT.

[0320] In certain embodiments useful for inducing differentiation of mensenchymal or progenitor stem cells from the cartilage cell lineage, regenerating cartilage tissues, repairing cartilage and protecting from, for instance, osteoarthritis, costochondritis, Herniation, achondroplasia or relapsing polychondritis, PEP3 is selected from the group consisting of VPT, APT, VPQ and VSQ.

[0321] In certain embodiments useful for inducing differentiation of mensenchymal or progenitor stem cells from the cartilage cell lineage, regenerating cartilage tissues, repairing cartilage and protecting from, for instance, osteoarthritis, costochondritis, Herniation, achondroplasia or relapsing polychondritis, PEP5 is a peptide of general formula PEP3-AA¹¹-AA¹²; wherein PEP3 is selected from the group consisting of VPT, APT, VPQ and VSQ; wherein AA¹¹ is selected from the group consisting of E, K, Q, R, A, D, G and H, in particular E, K, Q, R, A and D; wherein AA¹² is selected from the group consisting of L, M, T, E, Q and H, in particular is L. In one particular example, PEP5 is selected from the group consisting of VPTEL, APTKL, APTKL, VPTRL, VPQAL, VSQDL and VPQDL.

[0322] In certain embodiments useful for inducing differentiation of mensenchymal or progenitor stem cells from the cartilage cell lineage, regenerating cartilage tissues, repairing cartilage and protecting from, for instance, osteoarthritis, costochondritis, Herniation, achondroplasia or relapsing polychondritis, PEP7 is an amino acid or a peptide with between two and seven amino acids of general formula AA¹-AA²-AA³-AA⁴-AA⁵-AA⁶-AA⁷; wherein AA¹, AA², AA³, AA⁴, and AA⁵ are independently absent or AA^{I} as defined herein; wherein AA⁶ is absent or selected from the group consisting of S, T, C, E, Q, P and R, preferably is S, C or T; wherein AA⁷ is absent or is selected from the group consisting of S, T, C, E, Q, P and R, preferably is S or C; and wherein at least one of AA¹, AA², AA³, AA⁴, AA⁵, AA⁶ or AA⁷ is not absent. In one particular example, PEP7 is selected from the group consisting of KIPKAXX, SIPKAXX, HVTKPTX, YVPKPXX, TVPKPXX, STPPTXX, ASAAPXX and ASASPXX.

[0323] In certain embodiments useful for inducing differentiation of mensenchymal or progenitor stem cells from the cartilage cell lineage, regenerating cartilage tissues, repairing cartilage and protecting from, for instance, osteoarthritis, costochondritis, Herniation, achondroplasia or relapsing polychondritis, PEP9 is a peptide of general formula AA¹-AA²-AA³-AA⁴-AA⁵-AA⁶-AA⁷-PEP5; wherein PEP5 is a peptide of formula PEP3-AA¹¹-AA¹²; wherein PEP3 is selected from the group consisting of VPT, APT, VPQ and VSQ; wherein AA¹¹ is selected from the group consisting of E, K, Q, R, A, D, G and H, in particular E, K, Q, R, A and D; wherein AA¹² is selected from the group consisting of L, M, T, E, Q and H, in particular is L; wherein AA¹, AA², AA³, AA⁴, and AA⁵ are independently absent or AA^{I} as defined herein; wherein AA⁶ is absent or selected from the group consisting of S, T, C, E, Q, P and R, preferably is S, C or T; wherein AA⁷ is selected from the group consisting of S, T, C, E, Q, P and R, preferably is S or C. In one particular example, PEP9 is selected from the group consisting of KIPKAXXVPTEL, SIPKAXXVPTEL, HVTKPTXAPTKL, YVPKPXXAPTKL, TVPKPXXAPTQL, STPPTXXVPTRL, ASAAPXXVPQAL, ASASPXXVSQDL and ASASPXXVPQDL.

[0324] In certain embodiments useful for inducing differentiation of mensenchymal or progenitor stem cells from the cartilage cell lineage, regenerating cartilage tissues, repairing cartilage and protecting from, for instance, osteoarthritis, costochondritis, Herniation, achondroplasia or relapsing polychondritis, PEP12 is a peptide of general formula PEP1-AA¹⁷-PEP11; wherein AA¹⁷ is selected from the group consisting of G, A, V, L, I, P, F, M, W, T and S (in particular is selected from the group consisting of M, I, L, V and T); wherein PEP1 is selected from the group consisting of SAIS, NAIS, SPIS, EPLP and EPLT.

[0325] In certain embodiments useful for inducing differentiation of mensenchymal or progenitor stem cells from the cartilage cell lineage, regenerating cartilage tissues, repairing cartilage and protecting from, for instance, osteoarthritis, costochondritis, Herniation, achondroplasia or relapsing polychondritis, PEP11 is a peptide with 3 amino acids of general formula AA¹⁸-AA¹⁹-AA²⁰; wherein AA¹⁸ is selected from the group consisting of L, V, Q, A and R, in particular is L or V; wherein AA¹⁹ is selected from the group consisting of F, W, H and Y, in particular is Y or F; wherein AA²⁰ is selected from the group consisting of L, F, Y and I. In one particular example, PEP11 is selected from the group consisting of LYL, LYF, LFI, VYY and LYY.

[0326] In certain embodiments useful for inducing differentiation of mensenchymal or progenitor stem cells from the cartilage cell lineage, regenerating cartilage tissues, repairing cartilage and protecting from, for instance, osteoarthritis, costochondritis, Herniation, achondroplasia or relapsing polychondritis, PEP1 is selected from the group consisting of SAIS, NAIS, SPIS, EPLP and EPLT; PEP11 is selected from the group consisting of LYL, LYF, LFI, VYY and LYY; and the pair PEP1:PEP11 is selected from the group consisting of SAIS:LYL, NAIS:LYF, EPLP:VYY and EPLT:LYY.

[0327] The definitions of “PEP” pairs and triplets e.g. PEP3:PEP1, PEP5:PEP12, or PEP7:PEP5:PEP1, most particularly useful for inducing differentiation of mensenchymal or progenitor stem cells from the cartilage cell lineage, regenerating cartilage tissues, repairing cartilage and protecting from, for instance, osteoarthritis, costochondritis, Herniation, achondroplasia or relapsing polychondritis, are as already defined herein to the extent that PEP1, PEP3, PEP5, PEP7, PEP9, PEP11 and PEP12 are particularly useful for these applications as defined in the present cartilage section.

[0328] In certain embodiments useful for inducing differentiation of mensenchymal or progenitor stem cells from the cartilage cell lineage, regenerating cartilage tissues, repairing cartilage and protecting from, for instance, osteoarthritis, costochondritis, Herniation, achondroplasia or relapsing polychondritis, said GFR-binding compound is a synthetic molecule as defined herein in the definition section.

[0329] In certain embodiments useful for inducing differentiation of mensenchymal or progenitor stem cells from the cartilage cell lineage, regenerating cartilage tissues, repairing cartilage and protecting from, for instance, osteoarthritis, costochondritis, Herniation, achondroplasia or relapsing polychondritis, said GFR-binding compound is a synthetic peptide, or a variant or analog thereof, or a peptidomimetic.

[0330] Vascular Tissues

[0331] Certain embodiments of the invention are particularly useful for inducing differentiation of mensenchymal or progenitor stem cells from the vascular cell lineage, enhancing of endothelization, vascularization/angiogenesis, protecting a subject from heart tissue degeneration-related diseases, disorders, conditions or pathologies.

[0332] In other embodiments useful for inducing differentiation of mensenchymal or progenitor stem cells from the vascular cell lineage, enhancing of endothelization, vascularization/angiogenesis, protecting a subject from heart tissue degeneration-related diseases, disorders, conditions or pathologies, PEP1 is selected from the group consisting of SNIT, RPVQ and RSVK.

[0333] In other embodiments useful for inducing differentiation of mensenchymal or progenitor stem cells from the vascular cell lineage, enhancing of endothelization, vascularization/angiogenesis, protecting a subject from heart tissue degeneration-related diseases, disorders, conditions or pathologies, PEP3 is selected from the group consisting of VPT, SRV and TQV.

[0334] In other embodiments useful for inducing differentiation of mensenchymal or progenitor stem cells from the vascular cell lineage, enhancing of endothelization, vascularization/angiogenesis, protecting a subject from heart tissue degeneration-related diseases, disorders, conditions or pathologies, PEP5 is a peptide of general formula PEP3-AA¹¹-AA¹²; wherein PEP3 is selected from the group consisting of VPT, SRV and TQV; wherein AA¹¹ is selected from the group consisting of E, K, Q, R, A, D, G and H, in particular is E, G, H and Q; wherein AA¹² is selected from the group consisting of L, M, T, E, Q and H, in particular is selected from the group consisting of E, Q, H and L. In one particular example, PEP5 is selected from the group consisting of VPTGQ, VPTEE, SRVHH and TQVQL.

[0335] In other embodiments useful for inducing differentiation of mensenchymal or progenitor stem cells from the vascular cell lineage, enhancing of endothelization, vascularization/angiogenesis, protecting a subject from heart tissue degeneration-related diseases, disorders, conditions or pathologies, PEP7 is an amino acid or a peptide with between two and seven amino acids of general formula AA¹-AA²-AA³-AA⁴-AA⁵-AA⁶-AA⁷; wherein AA¹, AA², AA³, AA⁴, and AA⁵ are independently absent or AA^{I} as defined herein; wherein AA⁶ is absent or selected from the group consisting of S, T, C, E, Q, P and R, preferably is selected from the group consisting of E, Q and R; wherein AA⁷ is absent or is selected from the group consisting of S, T, C, E, Q, P and R, preferably is selected from the group consisting of S, C and P; and wherein at least one of AA¹, AA², AA³, AA⁴, AA⁵, AA⁶ or AA⁷ is not absent. In one particular example, PEP7 is selected from the group consisting of NDEGLEX, SSVKXQP and RNVQXRP.

[0336] In other embodiments useful for inducing differentiation of mensenchymal or progenitor stem cells from the vascular cell lineage, enhancing of endothelization, vascularization/angiogenesis, protecting a subject from heart tissue degeneration-related diseases, disorders, conditions or pathologies, PEP9 is a peptide of general formula AA¹-AA²-AA³-AA⁴-AA⁵-AA⁶-AA⁷-PEP5; wherein PEP5 is a peptide of formula PEP3-AA¹¹-AA¹²; wherein PEP3 is selected from the group consisting of VPT, SRV and TQV; wherein AA¹¹ is selected from the group consisting of E, K, Q, R, A, D, G and H, in particular is E, G, H and Q; wherein AA¹² is selected from the group consisting of L, M, T, E, Q and H, in particular is selected from the group consisting of E, Q, H and L; wherein AA¹, AA², AA³, AA⁴, and AA⁵ are independently absent or AA^{I} as defined herein; wherein AA⁶ is absent or selected from the group consisting of S, T, C, E, Q, P and R, preferably is selected from the group consisting of E, Q and R; wherein AA⁷ is selected from the group consisting of S, T, C, E, Q, P and R, preferably is selected from the group consisting of S, C and P. In one particular example, PEP9 is selected from the group consisting of NDEGLEXVPTEE, NDEGLEXVPTGQ, SSVKXQPSRVHH and RNVQXRPTQVQL.

[0337] In other embodiments useful for inducing differentiation of mensenchymal or progenitor stem cells from the vascular cell lineage, enhancing of endothelization, vascularization/angiogenesis, protecting a subject from heart tissue degeneration-related diseases, disorders, conditions or pathologies, PEP12 is a peptide of general formula PEP1-AA¹⁷-PEP11; wherein AA¹⁷ is selected from the group consisting of G, A, V, L, I, P, F, M, W, T and S (in particular is selected from the group consisting of M, I, L, V and T); wherein PEP1 is selected from the group consisting of SNIT, RPVQ and RSVK.

[0338] In other embodiments useful for inducing differentiation of mensenchymal or progenitor stem cells from the vascular cell lineage, enhancing of endothelization, vascularization/angiogenesis, protecting a subject from heart tissue degeneration-related diseases, disorders, conditions or pathologies, PEP11 is a peptide with 3 amino acids of general formula AA¹⁸-AA¹⁹-AA²⁰; wherein AA¹⁸ is selected from the group consisting of L, V, Q, A and R, in particular is selected from the group consisting of Q, A and R; wherein AA¹⁹ is selected from the group consisting of F, W, H, Y, I and K, in particular is I or K; wherein AA²⁰ is selected from the group consisting of L, F, Y, K, I, V and M, in particular is selected from the group consisting of M, V and I. In one particular example, PEP11 is selected from the group consisting of QIM, AKV and RKI.

[0339] In other embodiments useful for inducing differentiation of mensenchymal or progenitor stem cells from the vascular cell lineage, enhancing of endothelization, vascularization/angiogenesis, protecting a subject from heart tissue degeneration-related diseases, disorders, conditions or pathologies, PEP1 is selected from the group consisting of SNIT, RPVQ and RSVK; PEP11 is selected from the group consisting of QIM, AKV and RKI; and the pair PEP1:PEP11 is selected from the group consisting of SNIT:QIM, RSVK:KEVQV and RPVQ:KKATV.

[0340] The definitions of “PEP” pairs and triplets e.g. PEP3:PEP1, PEP5:PEP12, or PEP7:PEP5:PEP1, most particularly useful for inducing differentiation of mensenchymal or progenitor stem cells from the vascular cell lineage, enhancing of endothelization, vascularization/angiogenesis, protecting a subject from heart tissue degeneration-related diseases, disorders, conditions or pathologies, are as already defined herein to the extent that PEP1, PEP3, PEP5, PEP7, PEP9, PEP11 and PEP12 are particularly useful for these applications as defined in the present vascular tissue section.

[0341] In other embodiments useful for inducing differentiation of mensenchymal or progenitor stem cells from the vascular cell lineage, enhancing of endothelization, vascularization/angiogenesis, protecting a subject from heart tissue degeneration-related diseases, disorders, conditions or pathologies, said GFR-binding compound is a synthetic molecule as defined herein in the definition section.

[0342] In other embodiments useful for inducing differentiation of mensenchymal or progenitor stem cells from the vascular cell lineage, enhancing of endothelization, vascularization/angiogenesis, protecting a subject from heart tissue degeneration-related diseases, disorders, conditions or pathologies, said GFR-binding compound is a synthetic peptide, or a variant or analog thereof, or a peptidomimetic.

[0343] Neuroregeneration Certain embodiments of the invention are particularly useful for inducing differentiation of mensenchymal or progenitor stem cells from the neuronal cell lineage, promoting neuron-regeneration, and protecting from neuron degeneration-related conditions and diseases.

[0344] In certain embodiments useful for inducing differentiation of mensenchymal or progenitor stem cells from the neuronal cell lineage, promoting neuron-regeneration, and protecting from neuron degeneration-related conditions and diseases, PEP1 is selected from the group consisting of NAIS, SPIS and EPIS.

[0345] In certain embodiments useful for inducing differentiation of mensenchymal or progenitor stem cells from the neuronal cell lineage, promoting neuron-regeneration, and protecting from neuron degeneration-related conditions and diseases, PEP3 is selected from the group consisting of VPT, APT, VPA, VPQ and VSQ.

[0346] In certain embodiments useful for inducing differentiation of mensenchymal or progenitor stem cells from the neuronal cell lineage, promoting neuron-regeneration, and protecting from neuron degeneration-related conditions and diseases, PEP5 is a peptide of general formula PEP3-AA¹¹-AA¹²; wherein PEP3 is selected from the group consisting of VPT, APT, VPA, VPQ and VSQ; wherein AA¹¹ is selected from the group consisting of E, K, Q, R, A, D, G and H, in particular E, K, Q, R, A and D; wherein AA¹² is selected from the group consisting of L, M, T, E, Q and H, in particular L. In one particular example, PEP5 is selected from the group consisting of VPTEL, APTKL, APTKL, VPTKL, VPARL, VPQAL, VSQDL and VPQDL.

[0347] In certain embodiments useful for inducing differentiation of mensenchymal or progenitor stem cells from the neuronal cell lineage, promoting neuron-regeneration, and protecting from neuron degeneration-related conditions and diseases, PEP7 is an amino acid or a peptide with between two and seven amino acids of general formula AA¹-AA²-AA³-AA⁴-AA⁵-AA⁶-AA⁷; wherein AA¹, AA², AA³, AA⁴, and AA⁵ are independently absent or AA^{I} as defined herein; wherein AA⁶ is absent or selected from the group consisting of S, T, C, E, Q, P and R, preferably S or C; wherein AA⁷ is absent or is selected from the group consisting of S, T, C, E, Q, P and R, preferably is S or C; and wherein at least one of AA¹, AA², AA³, AA⁴, AA⁵, AA⁶ or AA⁷ is not absent. In one particular example, PEP7 is selected from the group consisting of KIPKAXX, SIPKAXX, HVTKPTX, YVPKPXX, TVPKPXX, AVPKAXX, KVGKAXX, ASAAPXX, ASASPXX and RNVQXRP.

[0348] In certain embodiments useful for inducing differentiation of mensenchymal or progenitor stem cells from the neuronal cell lineage, promoting neuron-regeneration, and protecting from neuron degeneration-related conditions and diseases, PEP9 is a peptide of general formula AA¹-AA²-AA³-AA⁴-AA⁵-AA⁶-AA⁷-PEP5; wherein PEP5 is a peptide of formula PEP3-AA¹¹-AA¹²; wherein PEP3 is selected from the group consisting of VPT, APT, VPA, VPQ and VSQ; wherein AA¹¹ is selected from the group consisting of E, K, Q, R, A, D, G and H, in particular E, K, Q, R, A and D; wherein AA¹² is selected from the group consisting of L, M, T, E, Q and H, in particular L; wherein AA¹, AA², AA³, AA⁴, and AA⁵ are independently absent or AA^{I} as defined herein; wherein AA⁶ is absent or selected from the group consisting of S, T, C, E, Q, P and R, preferably S or C; wherein AA⁷ is selected from the group consisting of S, T, C, E, Q, P and R, preferably is S or C. In one particular example, PEP9 is selected from the group consisting of KIPKAXXVPTEL, SIPKAXXVPTEL, HVTKPTXAPTKL, YVPKPXXAPTKL, TVPKPXXAPTQL, AVPKAXXAPTKL, KVGKAXXVPTKL, ASAAPXXVPQAL, ASASPXXVSQDL, ASASPXXVPQDL and RNVQXRPTQVQL.

[0349] In certain embodiments useful for inducing differentiation of mensenchymal or progenitor stem cells from the neuronal cell lineage, promoting neuron-regeneration, and protecting from neuron degeneration-related conditions and diseases, PEP12 is a peptide of general formula PEP1-AA¹⁷-PEP11; wherein AA¹⁷ is selected from the group consisting of G, A, V, L, I, P, F, M, W, T and S (in particular is selected from the group consisting of M, I, L, V and T); wherein PEP1 is selected from the group consisting of NAIS, SPIS and EPIS.

[0350] In certain embodiments useful for inducing differentiation of mensenchymal or progenitor stem cells from the neuronal cell lineage, promoting neuron-regeneration, and protecting from neuron degeneration-related conditions and diseases, PEP11 is a peptide with 3 amino acids of general formula AA¹⁸-AA¹⁹-AA²⁰; wherein AA¹⁸ is selected from the group consisting of L, V, Q, A and R, in particular is L; wherein AA¹⁹ is selected from the group consisting of F, W, H and Y (in particular is an aromatic, polar amino acid such as Y); wherein AA²⁰ is selected from the group consisting of L, F, Y, K, I, V and M, in particular is selected from the group consisting of L, F, I, and K. In one particular example, PEP11 is selected from the group consisting of LYL, LYF, LYI and LYK.

[0351] In certain embodiments useful for inducing differentiation of mensenchymal or progenitor stem cells from the neuronal cell lineage, promoting neuron-regeneration, and protecting from neuron degeneration-related conditions and diseases, PEP1 is selected from the group consisting of NAIS, SPIS and EPIS; PEP11 is selected from the group consisting of LYF, LYK, LYL and LYI; and the pair PEP1:PEP11 is selected from the group consisting of NAIS:LYF, SPIS:LYK, EPIS:LYL and SPIS:LYI.

[0352] The definitions of “PEP” pairs and triplets e.g. PEP3:PEP1, PEP5:PEP12, or PEP7:PEP5:PEP1, most particularly useful for inducing differentiation of mensenchymal or progenitor stem cells from the neuronal cell lineage, promoting neuron-regeneration, and protecting from neuron degeneration-related conditions and diseases, are as already defined herein to the extent that PEP1, PEP3, PEP5, PEP7, PEP9, PEP11 and PEP12 are particularly useful for these applications as defined in the present neuroregeneration section.

[0353] In certain embodiments useful for inducing differentiation of mensenchymal or progenitor stem cells from the neuronal cell lineage, promoting neuron-regeneration, and protecting from neuron degeneration-related conditions and diseases, said GFR-binding compound is a synthetic molecule as defined herein in the definition section.

[0354] In certain embodiments useful for inducing differentiation of mensenchymal or progenitor stem cells from the neuronal cell lineage, promoting neuron-regeneration, and protecting from neuron degeneration-related conditions and diseases, said GFR-binding compound is a synthetic peptide, or a variant or analog thereof, or a peptidomimetic.

[0355] Eye Retina

[0356] Certain embodiments of the invention are particularly useful for inducing differentiation of mensenchymal or progenitor stem cells from the retinal cell lineage, promoting eye retina cell regeneration and protecting from eye retina cell degeneration-related conditions or diseases such as macular degeneration.

[0357] In certain embodiments useful for inducing differentiation of mensenchymal or progenitor stem cells from the retinal cell lineage, promoting eye retina cell regeneration and protecting from eye retina cell degeneration-related conditions or diseases, PEP1 is SPIN.

[0358] In certain embodiments useful for inducing differentiation of mensenchymal or progenitor stem cells from the retinal cell lineage, promoting eye retina cell regeneration and protecting from eye retina cell degeneration-related conditions or diseases, PEP3 is selected from the group consisting of VPT, APT, TPT, VPA and APV.

[0359] In certain embodiments useful for inducing differentiation of mensenchymal or progenitor stem cells from the retinal cell lineage, promoting eye retina cell regeneration and protecting from eye retina cell degeneration-related conditions or diseases, PEP5 is a peptide of general formula PEP3-AA¹¹-AA¹²; wherein PEP3 is selected from the group consisting of VPT, APT, TPT, VPA and APV; wherein AA¹¹ is selected from the group consisting of E, K, Q, R, A, D, G and H, in particular is E, K, Q and R; wherein AA¹² is selected from the group consisting of L, M, T, E, Q and H, in particular is L, M or T. In one particular example, PEP5 is selected from the group consisting of VPTEL, APTKL, APTKL, VPTKL, TPTKM, VPARL, VPTRL and APVKT.

[0360] In certain embodiments useful for inducing differentiation of mensenchymal or progenitor stem cells from the retinal cell lineage, promoting eye retina cell regeneration and protecting from eye retina cell degeneration-related conditions or diseases, PEP7 is an amino acid or a peptide with between two and seven amino acids of general formula AA¹-AA²-AA³-AA⁴-AA⁵-AA⁶-AA⁷; wherein AA¹, AA², AA³, AA⁴, and AA⁵ are independently absent or AA^{I} as defined herein; wherein AA⁶ is absent or selected from the group consisting of S, T, C, E, Q, P and R, preferably is S or C; wherein AA⁷ is absent or is selected from the group consisting of S, T, C, E, Q, P and R, preferably is S or C; and wherein at least one of AA¹, AA², AA³, AA⁴, AA⁵, AA⁶ or AA⁷ is not absent. In one particular example, PEP7 is selected from the group consisting of KIPKAXX, SIPKAXX, HVTKPTX, YVPKPXX, TVPKPXX, AVPKAXX, KVGKAXX, KASKAXX, GSAGPXX, AAPAXXS, STPPTXX, HVPKPXX and RVPSTXX.

[0361] In certain embodiments useful for inducing differentiation of mensenchymal or progenitor stem cells from the retinal cell lineage, promoting eye retina cell regeneration and protecting from eye retina cell degeneration-related conditions or diseases, PEP9 is a peptide of general formula AA¹-AA²-AA³-AA⁴-AA⁵-AA⁶-AA⁷-PEP5; wherein PEP5 is a peptide of formula PEP3-AA¹¹-AA¹²; wherein PEP3 is selected from the group consisting of VPT, APT, TPT, VPA and APV; wherein AA¹¹ is selected from the group consisting of E, K, Q, R, A, D, G and H, in particular is E, K, Q and R; wherein AA¹² is selected from the group consisting of L, M, T, E, Q and H, in particular is L, M or T; wherein AA¹, AA², AA³, AA⁴, and AA⁵ are independently absent or AA^{I} as defined herein; wherein AA⁶ is absent or selected from the group consisting of S, T, C, E, Q, P and R, preferably is S or C; wherein AA⁷ is selected from the group consisting of S, T, C, E, Q, P and R, preferably is S or C. In one particular example, PEP9 is selected from the group consisting of KIPKAXXVPTEL, SIPKAXXVPTEL, HVTKPTXAPTKL, YVPKPXXAPTKL, TVPKPXXAPTQL, AVPKAXXAPTKL, KVGKAXXVPTKL, KASKAXXVPTKL, GSAGPXXTPTKL, AAPASXXVPARL, STPPTXXVPTRL, HVPKPXXAPTKL and RVPSTXXAPVKT.

[0362] In certain embodiments useful for inducing differentiation of mensenchymal or progenitor stem cells from the retinal cell lineage, promoting eye retina cell regeneration and protecting from eye retina cell degeneration-related conditions or diseases, PEP12 is a peptide of general formula PEP1-AA¹⁷-PEP11; wherein AA¹⁷ is selected from the group consisting of G, A, V, L, I, P, F, M, W, T and S (in particular is selected from the group consisting of M, I, L, V and T); wherein PEP1 is SPIN.

[0363] In certain embodiments useful for inducing differentiation of mensenchymal or progenitor stem cells from the retinal cell lineage, promoting eye retina cell regeneration and protecting from eye retina cell degeneration-related conditions or diseases, PEP11 is a peptide with 3 amino acids of general formula AA¹⁸-AA¹⁹-AA²⁰; wherein AA¹⁸ is selected from the group consisting of L, V, Q, A and R, in particular is L; wherein AA¹⁹ is selected from the group consisting of F, W, H and Y, in particular is Y or F; wherein AA²⁰ is selected from the group consisting of L, F, Y, K, I, V and M, in particular is selected from the group consisting of L, F, Y, K, I and V. In one particular example, PEP11 is LYF.

[0364] In certain embodiments useful for inducing differentiation of mensenchymal or progenitor stem cells from the retinal cell lineage, promoting eye retina cell regeneration and protecting from eye retina cell degeneration-related conditions or diseases, PEP1 is SPIN and PEP11 is LYF.

[0365] The definitions of “PEP” pairs and triplets e.g. PEP3:PEP1, PEP5:PEP12, or PEP7:PEP5:PEP1, most particularly useful for inducing differentiation of mensenchymal or progenitor stem cells from the retinal cell lineage, promoting eye retina cell regeneration and protecting from eye retina cell degeneration-related conditions or diseases, are as already defined herein to the extent that PEP1, PEP3, PEP5, PEP7, PEP9, PEP11 and PEP12 are particularly useful for these applications as defined in the present eye retina section.

[0366] In certain embodiments useful for inducing differentiation of mensenchymal or progenitor stem cells from the retinal cell lineage, promoting eye retina cell regeneration and protecting from eye retina cell degeneration-related conditions or diseases, said GFR-binding compound is a synthetic molecule as defined herein in the definition section.

[0367] In certain embodiments useful for inducing differentiation of mensenchymal or progenitor stem cells from the retinal cell lineage, promoting eye retina cell regeneration and protecting from eye retina cell degeneration-related conditions or diseases, said GFR-binding compound is a synthetic peptide, or a variant or analog thereof, or a peptidomimetic.

[0368] Renal Tissues

[0369] Certain embodiments of the invention are particularly useful for inducing differentiation of mensenchymal or progenitor stem cells from the renal cell lineage, promoting renal cell regeneration and/or renal functions and protecting from renal cell degeneration-related conditions or diseases such as chronic kidney disease or renal fibrosis.

[0370] In certain embodiments useful for inducing differentiation of mensenchymal or progenitor stem cells from the renal cell lineage, promoting renal cell regeneration and/or renal functions and protecting from renal cell degeneration-related conditions or diseases, PEP1 is SPIN.

[0371] In certain embodiments useful for inducing differentiation of mensenchymal or progenitor stem cells from the renal cell lineage, promoting renal cell regeneration and/or renal functions and protecting from renal cell degeneration-related conditions or diseases, PEP3 is selected from the group consisting of VPT, APT, TPT, VPA and APV.

[0372] In certain embodiments useful for inducing differentiation of mensenchymal or progenitor stem cells from the renal cell lineage, promoting renal cell regeneration and/or renal functions and protecting from renal cell degeneration-related conditions or diseases, PEP5 is a peptide of general formula PEP3-AA¹¹-AA¹²; wherein PEP3 is selected from the group consisting of VPT, APT, TPT, VPA and APV; wherein AA¹¹ is selected from the group consisting of E, K, Q, R, A, D, G and H, in particular is E, K, Q and R; wherein AA¹² is selected from the group consisting of L, M, T, E, Q and H, in particular is L, M or T. In one particular example, PEP5 is

[0373] In certain embodiments useful for inducing differentiation of mensenchymal or progenitor stem cells from the renal cell lineage, promoting renal cell regeneration and/or renal functions and protecting from renal cell degeneration-related conditions or diseases, PEP7 is an amino acid or a peptide with between two and seven amino acids of general formula AA¹-AA²-AA³-AA⁴-AA⁵-AA⁶-AA⁷; wherein AA¹, AA², AA³, AA⁴, and AA⁵ are independently absent or AA^{I} as defined herein; wherein AA⁶ is absent or selected from the group consisting of S, T, C, E, Q, P and R, preferably is S or C; wherein AA⁷ is absent or is selected from the group consisting of S, T, C, E, Q, P and R, preferably is S or C; and wherein at least one of AA¹, AA², AA³, AA⁴, AA⁵, AA⁶ or AA⁷ is not absent. In one particular example, PEP7 is selected from the group consisting of KIPKAXX, SIPKAXX, HVTKPTX, YVPKPXX, TVPKPXX, AVPKAXX, KVGKAXX, KASKAXX, GSAGPXX, AAPAXXS, STPPTXX, HVPKPXX and RVPSTXX.

[0374] In certain embodiments useful for inducing differentiation of mensenchymal or progenitor stem cells from the renal cell lineage, promoting renal cell regeneration and/or renal functions and protecting from renal cell degeneration-related conditions or diseases, PEP9 is a peptide of general formula AA¹-AA²-AA³-AA⁴-AA⁵-AA⁶-AA⁷-PEP5; wherein PEP5 is a peptide of formula PEP3-AA¹¹-AA¹²; wherein PEP3 is selected from the group consisting of VPT, APT, TPT, VPA and APV; wherein AA¹¹ is selected from the group consisting of E, K, Q, R, A, D, G and H, in particular is E, K, Q and R; wherein AA¹² is selected from the group consisting of L, M, T, E, Q and H, in particular is L, M or T; wherein AA¹, AA², AA³, AA⁴, and AA⁵ are independently absent or AA^{I} as defined herein; wherein AA⁶ is absent or selected from the group consisting of S, T, C, E, Q, P and R, preferably is S or C; wherein AA⁷ is selected from the group consisting of S, T, C, E, Q, P and R, preferably is S or C. In one particular example, PEP9 is selected from the group consisting of KIPKAXXVPTEL, SIPKAXXVPTEL, HVTKPTXAPTKL, YVPKPXXAPTKL, TVPKPXXAPTQL, AVPKAXXAPTKL, KVGKAXXVPTKL, KASKAXXVPTKL, GSAGPXXTPTKL, AAPASXXVPARL, STPPTXXVPTRL, HVPKPXXAPTKL and RVPSTXXAPVKT.

[0375] In certain embodiments useful for inducing differentiation of mensenchymal or progenitor stem cells from the renal cell lineage, promoting renal cell regeneration and/or renal functions and protecting from renal cell degeneration-related conditions or diseases, PEP12 is a peptide of general formula PEP1-AA¹⁷-PEP11; wherein AA¹⁷ is selected from the group consisting of G, A, V, L, I, P, F, M, W, T and S (in particular is selected from the group consisting of M, I, L, V and T); wherein PEP1 is SPIN.

[0376] In certain embodiments useful for inducing differentiation of mensenchymal or progenitor stem cells from the renal cell lineage, promoting renal cell regeneration and/or renal functions and protecting from renal cell degeneration-related conditions or diseases, PEP11 is a peptide with 3 amino acids of general formula AA¹⁸-AA¹⁹-AA²⁰; wherein AA¹⁸ is selected from the group consisting of L, V, Q, A and R, in particular is L; wherein AA¹⁹ is selected from the group consisting of F, W, H and Y, in particular is Y or F; wherein AA²⁰ is selected from the group consisting of L, F, Y, K, I, V and M, in particular is selected from the group consisting of L, F, Y, K, I and V. In one particular example, PEP11 is LYF.

[0377] In certain embodiments useful for inducing differentiation of mensenchymal or progenitor stem cells from the renal cell lineage, promoting renal cell regeneration and/or renal functions and protecting from renal cell degeneration-related conditions or diseases, PEP1 is SPIN and PEP11 is LYF.

[0378] The definitions of “PEP” pairs and triplets e.g. PEP3:PEP1, PEP5:PEP12, or PEP7:PEP5:PEP1, most particularly useful for inducing differentiation of mensenchymal or progenitor stem cells from the renal cell lineage, promoting renal cell regeneration and/or renal functions and protecting from renal cell degeneration-related conditions or diseases, are as already defined herein to the extent that PEP1, PEP3, PEP5, PEP7, PEP9, PEP11 and PEP12 are particularly useful for these applications as defined in the present renal tissue section.

[0379] In certain embodiments useful for inducing differentiation of mensenchymal or progenitor stem cells from the renal cell lineage, promoting renal cell regeneration and/or renal functions and protecting from renal cell degeneration-related conditions or diseases, said GFR-binding compound is a synthetic molecule as defined herein in the definition section.

[0380] In certain embodiments useful for inducing differentiation of mensenchymal or progenitor stem cells from the renal cell lineage, promoting renal cell regeneration and/or renal functions and protecting from renal cell degeneration-related conditions or diseases, said GFR-binding compound is a synthetic peptide, or a variant or analog thereof, or a peptidomimetic.

[0381] Ligaments and Tendons

[0382] Certain embodiments of the invention are particularly useful for inducing differentiation of mensenchymal or progenitor stem cells from the ligament and tendon (L/T) cell lineage, promoting fibrous tissue formation and T/L regeneration and protecting from UT cell degeneration and L/T cell degeneration-related diseases, conditions, disorders or pathologies.

[0383] In certain embodiments useful for inducing differentiation of mensenchymal or progenitor stem cells from the ligament and tendon (L/T) cell lineage, promoting fibrous tissue formation and T/L regeneration and protecting from UT cell degeneration and L/T cell degeneration-related diseases, conditions, disorders or pathologies, PEP1 is selected from the group consisting of NAIS, SPIS, EPLP and EPLT.

[0384] In certain embodiments useful for inducing differentiation of mensenchymal or progenitor stem cells from the ligament and tendon (L/T) cell lineage, promoting fibrous tissue formation and T/L regeneration and protecting from UT cell degeneration and L/T cell degeneration-related diseases, conditions, disorders or pathologies, PEP3 is selected from the group consisting of VPT, APT, VPQ and VSQ.

[0385] In certain embodiments useful for inducing differentiation of mensenchymal or progenitor stem cells from the ligament and tendon (L/T) cell lineage, promoting fibrous tissue formation and T/L regeneration and protecting from UT cell degeneration and L/T cell degeneration-related diseases, conditions, disorders or pathologies, PEP5 is a peptide of general formula PEP3-AA¹¹-AA¹²; wherein PEP3 is selected from the group consisting of VPT, APT, VPQ and VSQ; wherein AA¹¹ is selected from the group consisting of E, K, Q, R, A, D, G and H, in particular is E, K, Q, R, A and D; wherein AA¹² is selected from the group consisting of L, M, T, E, Q and H, in particular is L. In one particular example, PEP5 is selected from the group consisting of VPTEL, APTKL, APTKL, VPTRL, VPQAL, VSQDL and VPQDL.

[0386] In certain embodiments useful for inducing differentiation of mensenchymal or progenitor stem cells from the ligament and tendon (L/T) cell lineage, promoting fibrous tissue formation and T/L regeneration and protecting from UT cell degeneration and L/T cell degeneration-related diseases, conditions, disorders or pathologies, PEP7 is an amino acid or a peptide with between two and seven amino acids of general formula AA¹-AA²-AA³-AA⁴-AA⁵-AA⁶-AA⁷; wherein AA¹, AA², AA³, AA⁴, and AA⁵ are independently absent or AA^{I} as defined herein; wherein AA⁶ is absent or selected from the group consisting of S, T, C, E, Q, P and R, preferably is selected from the group consisting of T, S and C; wherein AA⁷ is absent or is selected from the group consisting of S, T, C, E, Q, P and R, preferably S or C; and wherein at least one of AA¹, AA², AA³, AA⁴, AA⁵, AA⁶ or AA⁷ is not absent. In one particular example, PEP7 is selected from the group consisting of KIPKAXX, SIPKAXX, HVTKPTX, YVPKPXX, TVPKPXX, STPPTXX, ASAAPXX and ASASPXX.

[0387] In certain embodiments useful for inducing differentiation of mensenchymal or progenitor stem cells from the ligament and tendon (L/T) cell lineage, promoting fibrous tissue formation and T/L regeneration and protecting from UT cell degeneration and UT cell degeneration-related diseases, conditions, disorders or pathologies, PEP9 is a peptide of general formula AA¹-AA²-AA³-AA⁴-AA⁵-AA⁶-AA⁷-PEP5; wherein PEP5 is a peptide of formula PEP3-AA¹¹-AA¹²; wherein PEP3 is selected from the group consisting of VPT, APT, VPQ and VSQ; wherein AA¹¹ is selected from the group consisting of E, K, Q, R, A, D, G and H, in particular is E, K, Q, R, A and D; wherein AA¹² is selected from the group consisting of L, M, T, E, Q and H, in particular is L; wherein AA¹, AA², AA³, AA⁴, and AA⁵ are independently absent or AA^{I} as defined herein; wherein AA⁶ is absent or selected from the group consisting of S, T, C, E, Q, P and R, preferably is selected from the group consisting of T, S and C; wherein AA⁷ is selected from the group consisting of S, T, C, E, Q, P and R, preferably S or C. In one particular example, PEP9 is selected from the group consisting of KIPKAXXVPTEL, SIPKAXXVPTEL, HVTKPTXAPTKL, YVPKPXXAPTKL, TVPKPXXAPTQL, STPPTXXVPTRL, ASAAPXXVPQAL, ASASPXXVSQDL and ASASPXXVPQDL.

[0388] In certain embodiments useful for inducing differentiation of mensenchymal or progenitor stem cells from the ligament and tendon (L/T) cell lineage, promoting fibrous tissue formation and T/L regeneration and protecting from UT cell degeneration and UT cell degeneration-related diseases, conditions, disorders or pathologies, PEP12 is a peptide of general formula PEP1-AA¹⁷-PEP11; wherein AA¹⁷ is selected from the group consisting of G, A, V, L, I, P, F, M, W, T and S (in particular is selected from the group consisting of M, I, L, V and T); wherein PEP1 is selected from the group consisting of NAIS, SPIS, EPLP and EPLT.

[0389] In certain embodiments useful for inducing differentiation of mensenchymal or progenitor stem cells from the ligament and tendon (L/T) cell lineage, promoting fibrous tissue formation and T/L regeneration and protecting from UT cell degeneration and L/T cell degeneration-related diseases, conditions, disorders or pathologies, PEP11 is a peptide with 3 amino acids of general formula AA¹⁸-AA¹⁹-AA²⁰; wherein AA¹⁸ is selected from the group consisting of L, V, Q, A and R, in particular is L or V; wherein AA¹⁹ is selected from the group consisting of F, W, H and Y, in particular is Y or F; wherein AA²⁰ is selected from the group consisting of L, F, Y, K, I, V and M, in particular is selected from the group consisting of F, I and Y. In one particular example, PEP11 is selected from the group consisting of LYF, LFI, VYY and LYY.

[0390] In certain embodiments useful for inducing differentiation of mensenchymal or progenitor stem cells from the ligament and tendon (L/T) cell lineage, promoting fibrous tissue formation and T/L regeneration and protecting from UT cell degeneration and L/T cell degeneration-related diseases, conditions, disorders or pathologies, PEP1 is selected from the group consisting of NAIS, SPIS, EPLP and EPLT; PEP11 is selected from the group consisting of LYF, LFI, VYY and LYY; and the pair PEP1:PEP11 is selected from the group consisting of NAIS:LYF, EPLP:VYY and EPLT:LYY.

[0391] The definitions of “PEP” pairs and triplets e.g. PEP3:PEP1, PEP5:PEP12, or PEP7:PEP5:PEP1, most particularly useful for inducing differentiation of mensenchymal or progenitor stem cells from the ligament and tendon (L/T) cell lineage, promoting fibrous tissue formation and T/L regeneration and protecting from UT cell degeneration and UT cell degeneration-related diseases, conditions, disorders or pathologies, are as already defined herein to the extent that PEP1, PEP3, PEP5, PEP7, PEP9, PEP11 and PEP12 are particularly useful for these applications as defined in the present UT section.

[0392] In certain embodiments useful for inducing differentiation of mensenchymal or progenitor stem cells from the ligament and tendon (L/T) cell lineage, promoting fibrous tissue formation and T/L regeneration and protecting from UT cell degeneration and UT cell degeneration-related diseases, conditions, disorders or pathologies, said GFR-binding compound is a synthetic molecule as defined herein in the definition section.

[0393] In certain embodiments useful for inducing differentiation of mensenchymal or progenitor stem cells from the ligament and tendon (L/T) cell lineage, promoting fibrous tissue formation and T/L regeneration and protecting from UT cell degeneration and UT cell degeneration-related diseases, conditions, disorders or pathologies, said GFR-binding compound is a synthetic peptide, or a variant or analog thereof, or a peptidomimetic.

[0394] In other embodiments also useful for inducing differentiation of mensenchymal or progenitor stem cells from the ligament and tendon (UT) cell lineage, promoting fibrous tissue formation and T/L regeneration and protecting from UT cell degeneration and UT cell degeneration-related diseases, conditions, disorders or pathologies, PEP1 is SPIS.

[0395] In other embodiments also useful for inducing differentiation of mensenchymal or progenitor stem cells from the ligament and tendon (UT) cell lineage, promoting fibrous tissue formation and T/L regeneration and protecting from UT cell degeneration and L/T cell degeneration-related diseases, conditions, disorders or pathologies, PEP3 is selected from the group consisting of VPT, APT, TPT, VPA and APV.

[0396] In other embodiments also useful for inducing differentiation of mensenchymal or progenitor stem cells from the ligament and tendon (L/T) cell lineage, promoting fibrous tissue formation and T/L regeneration and protecting from UT cell degeneration and L/T cell degeneration-related diseases, conditions, disorders or pathologies, PEP5 is a peptide of general formula PEP3-AA¹¹-AA¹²; wherein PEP3 is selected from the group consisting of VPT, APT, TPT, VPA and APV; wherein AA¹¹ is selected from the group consisting of E, K, Q, R, A, D, G and H, in particular is selected from the group consisting of E, K, Q and R; wherein AA¹² is selected from the group consisting of L, M, T, E, Q and H, in particular is selected from the group consisting of L, M and T. In one particular example, PEP5 is selected from the group consisting of VPTEL, APTKL, APTKL, VPTKL, TPTKM, VPARL, VPTRL and APVKT.

[0397] In other embodiments also useful for inducing differentiation of mensenchymal or progenitor stem cells from the ligament and tendon (L/T) cell lineage, promoting fibrous tissue formation and T/L regeneration and protecting from UT cell degeneration and UT cell degeneration-related diseases, conditions, disorders or pathologies, PEP7 is an amino acid or a peptide with between two and seven amino acids of general formula AA¹-AA²-AA³-AA⁴-AA⁵-AA⁶-AA⁷; wherein AA¹, AA², AA³, AA⁴, and AA⁵ are independently absent or AA^{I} as defined herein; wherein AA⁶ is absent or selected from the group consisting of S, T, C, E, Q, P and R, preferably is S or C; wherein AA⁷ is absent or is selected from the group consisting of S, T, C, E, Q, P and R, preferably is S or C; and wherein at least one of AA¹, AA², AA³, AA⁴, AA⁵, AA⁶ or AA⁷ is not absent. In one particular example, PEP7 is selected from the group consisting of KIPKAXX, SIPKAXX, HVTKPTX, YVPKPXX, TVPKPXX, AVPKAXX, KVGKAXX, KASKAXX, GSAGPXX, AAPAXXS, STPPTXX, HVPKPXX and RVPSTXX.

[0398] In other embodiments also useful for inducing differentiation of mensenchymal or progenitor stem cells from the ligament and tendon (UT) cell lineage, promoting fibrous tissue formation and T/L regeneration and protecting from UT cell degeneration and UT cell degeneration-related diseases, conditions, disorders or pathologies, PEP9 is a peptide of general formula AA¹-AA²-AA³-AA⁴-AA⁵-AA⁶-AA⁷-PEP5; wherein PEP5 is a peptide of formula PEP3-AA¹¹-AA¹²; wherein PEP3 is selected from the group consisting of VPT, APT, TPT, VPA and APV; wherein AA¹¹ is selected from the group consisting of E, K, Q, R, A, D, G and H, in particular is E, K, Q and R; wherein AA¹² is selected from the group consisting of L, M, T, E, Q and H, in particular is L, M or T; wherein AA¹, AA², AA³, AA⁴, and AA⁵ are independently absent or AA^{I} as defined herein; wherein AA⁶ is absent or selected from the group consisting of S, T, C, E, Q, P and R, preferably is S or C; wherein AA⁷ is selected from the group consisting of S, T, C, E, Q, P and R, preferably is S or C. In one particular example, PEP9 is selected from the group consisting of KIPKAXXVPTEL, SIPKAXXVPTEL, HVTKPTXAPTKL, YVPKPXXAPTKL, TVPKPXXAPTQL, AVPKAXXAPTKL, KVGKAXXVPTKL, KASKAXXVPTKL, GSAGPXXTPTKL, AAPASXXVPARL, STPPTXXVPTRL, HVPKPXXAPTKL and RVPSTXXAPVKT.

[0399] In other embodiments also useful for inducing differentiation of mensenchymal or progenitor stem cells from the ligament and tendon (UT) cell lineage, promoting fibrous tissue formation and T/L regeneration and protecting from UT cell degeneration and L/T cell degeneration-related diseases, conditions, disorders or pathologies, PEP12 is a peptide of general formula PEP1-AA¹⁷-PEP11; wherein AA¹⁷ is selected from the group consisting of G, A, V, L, I, P, F, M, W, T and S (in particular is selected from the group consisting of M, I, L, V and T); wherein PEP1 is SPIS.

[0400] In other embodiments also useful for inducing differentiation of mensenchymal or progenitor stem cells from the ligament and tendon (UT) cell lineage, promoting fibrous tissue formation and T/L regeneration and protecting from UT cell degeneration and L/T cell degeneration-related diseases, conditions, disorders or pathologies, PEP11 is a peptide with 3 amino acids of general formula AA¹⁸-AA¹⁹-AA²⁰; wherein AA¹⁸ is selected from the group consisting of L, V, Q, A and R, in particular is L; wherein AA¹⁹ is selected from the group consisting of F, W, H and Y, in particular is a polar aromatic amino acid such as Y; wherein AA²⁰ is selected from the group consisting of L, F, Y, K, I, V and M, in particular is I. In one particular example, PEP11 is LYI.

[0401] In other embodiments also useful for inducing differentiation of mensenchymal or progenitor stem cells from the ligament and tendon (L/T) cell lineage, promoting fibrous tissue formation and T/L regeneration and protecting from UT cell degeneration and L/T cell degeneration-related diseases, conditions, disorders or pathologies, PEP1 is SPIS and PEP11 is LYI.

[0402] The definitions of “PEP” pairs and triplets e.g. PEP3:PEP1, PEP5:PEP12, or PEP7:PEP5:PEP1, also most particularly useful for inducing differentiation of mensenchymal or progenitor stem cells from the ligament and tendon (L/T) cell lineage, promoting fibrous tissue formation and T/L regeneration and protecting from UT cell degeneration and L/T cell degeneration-related diseases, conditions, disorders or pathologies, are as already defined herein to the extent that PEP1, PEP3, PEP5, PEP7, PEP9, PEP11 and PEP12 are particularly useful for these applications as defined in the present UT section.

[0403] In other embodiments also useful for inducing differentiation of mensenchymal or progenitor stem cells from the ligament and tendon (L/T) cell lineage, promoting fibrous tissue formation and T/L regeneration and protecting from UT cell degeneration and L/T cell degeneration-related diseases, conditions, disorders or pathologies, said GFR-binding compound is a synthetic molecule as defined herein in the definition section.

[0404] In other embodiments also useful for inducing differentiation of mensenchymal or progenitor stem cells from the ligament and tendon (L/T) cell lineage, promoting fibrous tissue formation and T/L regeneration and protecting from UT cell degeneration and L/T cell degeneration-related diseases, conditions, disorders or pathologies, said GFR-binding compound is a synthetic peptide, or a variant or analog thereof, or a peptidomimetic.

[0405] Wound Healing

[0406] Certain embodiments of the invention are particularly useful for inducing differentiation of mensenchymal or progenitor stem cells involved in the process of wound healing as defined herein, promoting wound healing, skin repair and cellular migration.

[0407] In certain embodiments useful for inducing differentiation of mensenchymal or progenitor stem cells involved in the process of wound healing as defined herein, promoting wound healing, skin repair and cellular migration, PEP1 is selected from the group consisting of SNIT, RPVQ and RSVK.

[0408] In certain embodiments useful for inducing differentiation of mensenchymal or progenitor stem cells involved in the process of wound healing as defined herein, promoting wound healing, skin repair and cellular migration, PEP3 is selected from the group consisting of VPT, SRV and TQV.

[0409] In certain embodiments useful for inducing differentiation of mensenchymal or progenitor stem cells involved in the process of wound healing as defined herein, promoting wound healing, skin repair and cellular migration, PEP5 is a peptide of general formula PEP3-AA¹¹-AA¹²; wherein PEP3 is selected from the group consisting of VPT, SRV and TQV; wherein AA¹¹ is selected from the group consisting of E, K, Q, R, A, D, G and H, in particular is selected from the group consisting of E, G, H and Q; wherein AA¹² is selected from the group consisting of L, M, T, E, Q and H, in particular is selected from the group consisting of E, Q, H and L. In one particular example, PEP5 is selected from the group consisting of VPTGQ, VPTEE, SRVHH and TQVQL.

[0410] In certain embodiments useful for inducing differentiation of mensenchymal or progenitor stem cells involved in the process of wound healing as defined herein, promoting wound healing, skin repair and cellular migration, PEP7 is an amino acid or a peptide with between two and seven amino acids of general formula AA¹-AA²-AA³-AA⁴-AA⁵-AA⁶-AA⁷; wherein AA¹, AA², AA³, AA⁴, and AA⁵ are independently absent or AA^{I} as defined herein; wherein AA⁶ is absent or selected from the group consisting of S, T, C, E, Q, P and R, preferably is selected from the group consisting of E, Q and R; wherein AA⁷ is absent or is selected from the group consisting of S, T, C, E, Q, P and R, preferably is selected from the group consisting of S, C and P; and wherein at least one of AA¹, AA², AA³, AA⁴, AA⁵, AA⁶ or AA⁷ is not absent. In one particular example, PEP7 is selected from the group consisting of NDEGLEX, SSVKXQP and RNVQXRP.

[0411] In certain embodiments useful for inducing differentiation of mensenchymal or progenitor stem cells involved in the process of wound healing as defined herein, promoting wound healing, skin repair and cellular migration, PEP9 is a peptide of general formula AA¹-AA²-AA³-AA⁴-AA⁵-AA⁶-AA⁷-PEP5; wherein PEP5 is a peptide of formula PEP3-AA¹¹-AA¹²; wherein PEP3 is selected from the group consisting of VPT, SRV and TQV; wherein AA¹¹ is selected from the group consisting of E, K, Q, R, A, D, G and H, in particular is E, G, H and Q; wherein AA¹² is selected from the group consisting of L, M, T, E, Q and H, in particular is selected from the group consisting of E, Q, H and L; wherein AA¹, AA², AA³, AA⁴, and AA⁵ are independently absent or AA^{I} as defined herein; wherein AA⁶ is absent or selected from the group consisting of S, T, C, E, Q, P and R, preferably is selected from the group consisting of E, Q and R; wherein AA⁷ is selected from the group consisting of S, T, C, E, Q, P and R, preferably is selected from the group consisting of S, C and P. In one particular example, PEP9 is selected from the group consisting of NDEGLEXVPTEE, NDEGLEXVPTGQ, SSVKXQPSRVHH and RNVQXRPTQVQL.

[0412] In certain embodiments useful for inducing differentiation of mensenchymal or progenitor stem cells involved in the process of wound healing as defined herein, promoting wound healing, skin repair and cellular migration, PEP12 is a peptide of general formula PEP1-AA¹⁷-PEP11; wherein AA¹⁷ is selected from the group consisting of G, A, V, L, I, P, F, M, W, T and S (in particular is selected from the group consisting of M, I, L, V and T); wherein PEP1 is selected from the group consisting of SNIT, RPVQ and RSVK.

[0413] In certain embodiments useful for inducing differentiation of mensenchymal or progenitor stem cells involved in the process of wound healing as defined herein, promoting wound healing, skin repair and cellular migration, PEP11 is a peptide with 3 amino acids of general formula AA¹⁸-AA¹⁹-AA²⁰; wherein AA¹⁸ is selected from the group consisting of L, V, Q, A and R, in particular is selected from the group consisting of Q, A and R; wherein AA¹⁹ is selected from the group consisting of F, W, H, Y, I and K, in particular is I or K; wherein AA²⁰ is selected from the group consisting of L, F, Y, K, I, V and M, in particular is selected from the group consisting of M, V and I. In one particular example, PEP11 is selected from the group consisting of QIM, AKV and RKI.

[0414] In certain embodiments useful for inducing differentiation of mensenchymal or progenitor stem cells involved in the process of wound healing as defined herein, promoting wound healing, skin repair and cellular migration, PEP1 is selected from the group consisting of SNIT, RPVQ and RSVK; PEP11 is selected from the group consisting of QIM, AKV and RKI; and the pair PEP1:PEP11 is selected from the group consisting of SNIT:QIM, RSVK:KEVQV and RPVQ:KKATV.

[0415] The definitions of “PEP” pairs and triplets e.g. PEP3:PEP1, PEP5:PEP12, or PEP7:PEP5:PEP1, also most particularly useful for inducing differentiation of mensenchymal or progenitor stem cells involved in the process of wound healing as defined herein, promoting wound healing, skin repair and cellular migration, are as already defined herein to the extent that PEP1, PEP3, PEP5, PEP7, PEP9, PEP11 and PEP12 are particularly useful for these applications as defined in the present wound healing section.

[0416] In certain embodiments useful for inducing differentiation of mensenchymal or progenitor stem cells involved in the process of wound healing as defined herein, promoting wound healing, skin repair and cellular migration, said GFR-binding compound is a synthetic molecule as defined herein in the definition section.

[0417] In certain embodiments useful for inducing differentiation of mensenchymal or progenitor stem cells involved in the process of wound healing as defined herein, promoting wound healing, skin repair and cellular migration, said GFR-binding compound is a synthetic peptide, or a variant or analog thereof, or a peptidomimetic.

[0418] Skin Regeneration and Anti-Aging

[0419] Certain embodiments of the invention are particularly useful for inducing differentiation of mensenchymal or progenitor stem cells from the fibroblast lineage, inducing skin tissue regeneration and tubular formation, preventing, attenuating, masking or removing wrinkles, firming the skin, preventing, decreasing or suppressing skin pigmentation, and protecting patients from skin tissue degeneration-related diseases, disorders, conditions or pathologies.

[0420] In certain embodiments useful for inducing differentiation of mensenchymal or progenitor stem cells from the fibroblast lineage, inducing skin tissue regeneration and tubular formation, preventing, attenuating, masking or removing wrinkles, firming the skin, preventing, decreasing or suppressing skin pigmentation, and protecting patients from skin tissue degeneration-related diseases, disorders, conditions or pathologies, PEP1 is selected from the group consisting of EPLP, EPLT, SNIT, RSVK and RPVQ.

[0421] In certain embodiments useful for inducing differentiation of mensenchymal or progenitor stem cells from the fibroblast lineage, inducing skin tissue regeneration and tubular formation, preventing, attenuating, masking or removing wrinkles, firming the skin, preventing, decreasing or suppressing skin pigmentation, and protecting patients from skin tissue degeneration-related diseases, disorders, conditions or pathologies, PEP3 is selected from the group consisting of VPT, APT, VPQ, VSQ, SRV and TQV.

[0422] In certain embodiments useful for inducing differentiation of mensenchymal or progenitor stem cells from the fibroblast lineage, inducing skin tissue regeneration and tubular formation, preventing, attenuating, masking or removing wrinkles, firming the skin, preventing, decreasing or suppressing skin pigmentation, and protecting patients from skin tissue degeneration-related diseases, disorders, conditions or pathologies, PEP5 is a peptide of general formula PEP3-AA¹¹-AA¹²; wherein PEP3 is selected from the group consisting of VPT, APT, VPQ, VSQ, SRV and TQV; wherein AA¹¹ is selected from the group consisting of E, K, Q, R, A, D, G and H, in particular is selected from the group consisting of E, K, Q, A, D and H; wherein AA¹² is selected from the group consisting of L, M, T, E, Q and H, in particular is selected from the group consisting of L, E and H. In one particular example, PEP5 is selected from the group consisting of VPTEL, APTKL, APTKL, VPQAL, VSQDL, VPQDL, VPTEE, SRVHH and TQVQL.

[0423] In certain embodiments useful for inducing differentiation of mensenchymal or progenitor stem cells from the fibroblast lineage, inducing skin tissue regeneration and tubular formation, preventing, attenuating, masking or removing wrinkles, firming the skin, preventing, decreasing or suppressing skin pigmentation, and protecting patients from skin tissue degeneration-related diseases, disorders, conditions or pathologies, PEP7 is an amino acid or a peptide with between two and seven amino acids of general formula AA¹-AA²-AA³-AA⁴-AA⁵-AA⁶-AA⁷; wherein AA¹, AA², AA³, AA⁴, and AA⁵ are independently absent or AA^{I} as defined herein; wherein AA⁶ is absent or selected from the group consisting of S, T, C, E, Q, P and R, preferably is selected from the group consisting of C, S, T, E, R and Q; wherein AA⁷ is absent or is selected from the group consisting of S, T, C, E, Q, P and R, preferably is selected from the group consisting of S, C and P; and wherein at least one of AA¹, AA², AA³, AA⁴, AA⁵, AA⁶ or AA⁷ is not absent. In one particular example, PEP7 is selected from the group consisting of KIPKAXX, SIPKAXX, HVTKPTX, YVPKPXX, TVPKPXX, ASAAPXX, ASASPXX, NDEGLEX, SSVKXQP and RNVQXRP.

[0424] In certain embodiments useful for inducing differentiation of mensenchymal or progenitor stem cells from the fibroblast lineage, inducing skin tissue regeneration and tubular formation, preventing, attenuating, masking or removing wrinkles, firming the skin, preventing, decreasing or suppressing skin pigmentation, and protecting patients from skin tissue degeneration-related diseases, disorders, conditions or pathologies, PEP9 is a peptide of general formula AA′-AA²-AA³-AA⁴-AA⁵-AA⁶-AA⁷-PEP5; wherein PEP5 is a peptide of formula PEP3-AA¹¹-AA¹²; wherein PEP3 is selected from the group consisting of VPT, APT, VPQ, VSQ, SRV and TQV; wherein AA¹¹ is selected from the group consisting of E, K, Q, R, A, D, G and H, in particular is selected from the group consisting of E, K, Q, A, D and H; wherein AA¹² is selected from the group consisting of L, M, T, E, Q and H, in particular is selected from the group consisting of L, E and H; wherein AA¹, AA², AA³, AA⁴, and AA⁵ are independently absent or AA^{I} as defined herein; wherein AA⁶ is absent or selected from the group consisting of S, T, C, E, Q, P and R, preferably is selected from the group consisting of C, S, T, E, R and Q; wherein AA^{I} is selected from the group consisting of S, T, C, E, Q, P and R, preferably is selected from the group consisting of S, C and P. In one particular example, PEP9 is selected from the group consisting of KIPKAXXVPTEL, SIPKAXXVPTEL, HVTKPTXAPTKL, YVPKPXXAPTKL, TVPKPXXAPTQL, ASAAPXXVPQAL, ASASPXXVSQDL, ASASPXXVPQDL, NDEGLEXVPTEE, SSVKXQPSRVHH and RNVQXRPTQVQL.

[0425] In certain embodiments useful for inducing differentiation of mensenchymal or progenitor stem cells from the fibroblast lineage, inducing skin tissue regeneration and tubular formation, preventing, attenuating, masking or removing wrinkles, firming the skin, preventing, decreasing or suppressing skin pigmentation, and protecting patients from skin tissue degeneration-related diseases, disorders, conditions or pathologies, PEP12 is a peptide of general formula PEP1-AA¹⁷-PEP11; wherein AA¹⁷ is selected from the group consisting of G, A, V, L, I, P, F, M, W, T and S (in particular is selected from the group consisting of M, I, L, V and T); wherein PEP1 is selected from the group consisting of EPLP, EPLT, SNIT, RSVK and RPVQ.

[0426] In certain embodiments useful for inducing differentiation of mensenchymal or progenitor stem cells from the fibroblast lineage, inducing skin tissue regeneration and tubular formation, preventing, attenuating, masking or removing wrinkles, firming the skin, preventing, decreasing or suppressing skin pigmentation, and protecting patients from skin tissue degeneration-related diseases, disorders, conditions or pathologies, PEP11 is a peptide with 3 amino acids of general formula AA¹⁸-AA¹⁹-AA²⁰; wherein AA¹⁸ is selected from the group consisting of L, V, Q, A and R; wherein AA¹⁹ is selected from the group consisting of F, W, H, Y, I and K, in particular is selected from the group consisting of Y, I and K; wherein AA²⁰ is selected from the group consisting of L, F, Y, K, I, V and M, in particular is selected from the group consisting of Y, M, V and I. In one particular example, PEP11 is selected from the group consisting of VYY, LYY, QIM, AKV and RKI.

[0427] In certain embodiments useful for inducing differentiation of mensenchymal or progenitor stem cells from the fibroblast lineage, inducing skin tissue regeneration and tubular formation, preventing, attenuating, masking or removing wrinkles, firming the skin, preventing, decreasing or suppressing skin pigmentation, and protecting patients from skin tissue degeneration-related diseases, disorders, conditions or pathologies, PEP1 is selected from the group consisting of EPLP, EPLT, SNIT, RSVK and RPVQ; PEP11 is selected from the group consisting of VYY, LYY, QIM, AKV and RKI; and the pair PEP1:PEP11 is selected from the group consisting of EPLP:VYY, EPLT:LYY, SNIT:QIM, RSVK:KEVQV and RPVQ:KKATV.

[0428] The definitions of “PEP” pairs and triplets e.g. PEP3:PEP1, PEP5:PEP12, or PEP7:PEP5:PEP1, also most particularly useful for inducing differentiation of mensenchymal or progenitor stem cells from the fibroblast lineage, inducing skin tissue regeneration and tubular formation, preventing, attenuating, masking or removing wrinkles, firming the skin, preventing, decreasing or suppressing skin pigmentation, and protecting patients from skin tissue degeneration-related diseases, disorders, conditions or pathologies, are as already defined herein to the extent that PEP1, PEP3, PEP5, PEP7, PEP9, PEP11 and PEP12 are particularly useful for these applications as defined in the present skin regeneration section.

[0429] In certain embodiments useful for inducing differentiation of mensenchymal or progenitor stem cells from the fibroblast lineage, inducing skin tissue regeneration and tubular formation, preventing, attenuating, masking or removing wrinkles, firming the skin, preventing, decreasing or suppressing skin pigmentation, and protecting patients from skin tissue degeneration-related diseases, disorders, conditions or pathologies, said GFR-binding compound is a synthetic molecule as defined herein in the definition section.

[0430] In certain embodiments useful for inducing differentiation of mensenchymal or progenitor stem cells from the fibroblast lineage, inducing skin tissue regeneration and tubular formation, preventing, attenuating, masking or removing wrinkles, firming the skin, preventing, decreasing or suppressing skin pigmentation, and protecting patients from skin tissue degeneration-related diseases, disorders, conditions or pathologies, said GFR-binding compound is a synthetic peptide, or a variant or analog thereof, or a peptidomimetic.

[0431] Hair

[0432] Certain embodiments of the invention are particularly useful for inducing differentiation of mensenchymal or progenitor stem cells from the hair follicle cell lineage, hair follicle tissue regeneration and formation (hair growth), and for protecting from hair follicle-related diseases, disorders, conditions or pathologies.

[0433] In certain embodiments useful for inducing differentiation of mensenchymal or progenitor stem cells from the hair follicle cell lineage, hair follicle tissue regeneration and formation (hair growth), and for protecting from hair follicle-related diseases, disorders, conditions or pathologies, PEP1 is SSLS.

[0434] In certain embodiments useful for inducing differentiation of mensenchymal or progenitor stem cells from the hair follicle cell lineage, hair follicle tissue regeneration and formation (hair growth), and for protecting from hair follicle-related diseases, disorders, conditions or pathologies, PEP3 is selected from the group consisting of VPT, VPE, APT, TPT, VPA, APV, VPQ, VSQ and SRV.

[0435] In certain embodiments useful for inducing differentiation of mensenchymal or progenitor stem cells from the hair follicle cell lineage, hair follicle tissue regeneration and formation (hair growth), and for protecting from hair follicle-related diseases, disorders, conditions or pathologies, PEP5 is a peptide of general formula PEP3-AA¹¹-AA¹²; wherein PEP3 is selected from the group consisting of VPT, VPE, APT, TPT, VPA, APV, VPQ, VSQ and SRV; wherein AA¹¹ is selected from the group consisting of E, K, Q, R, A, D, G and H, in particular is selected from the group consisting of E, K, Q, R, A, D and H; wherein AA¹² is selected from the group consisting of L, M, T, E, Q and H, in particular is selected from the group consisting of L, M, T, E and H. In one particular example, PEP5 is selected from the group consisting of VPTEL, VPEKM, APTKL, APTKL, VPTKL, TPTKM, VPARL, VPTRL, APVKT, VPQAL, VSQDL, VPQDL, VPTEE and SRVHH.

[0436] In certain embodiments useful for inducing differentiation of mensenchymal or progenitor stem cells from the hair follicle cell lineage, hair follicle tissue regeneration and formation (hair growth), and for protecting from hair follicle-related diseases, disorders, conditions or pathologies, PEP7 is an amino acid or a peptide with between two and seven amino acids of general formula AA¹-AA²-AA³-AA⁴-AA⁵-AA⁶-AA⁷; wherein AA¹, AA², AA³, AA⁴, and AA⁵ are independently absent or AA^{I} as defined herein; wherein AA⁶ is absent or selected from the group consisting of S, T, C, E, Q, P and R, preferably is selected from the group consisting of C, S, T, E and Q; wherein AA⁷ is absent or is selected from the group consisting of S, T, C, E, Q, P and R, preferably is selected from the group consisting of S, C and P; and wherein at least one of AA¹, AA², AA³, AA⁴, AA⁵, AA⁶ or AA⁷ is not absent. In one particular example, PEP7 is selected from the group consisting of KIPKAXX, GIPEPXX, SIPKAXX, HVTKPTX, YVPKPXX, TVPKPXX, AVPKAXX, KVGKAXX, KASKAXX, GSAGPXX, AAPASXX, STPPTXX, HVPKPXX, RVPSTXX, ASAAPXX, ASASPXX, NDEGLEX and SSVKXQP.

[0437] In certain embodiments useful for inducing differentiation of mensenchymal or progenitor stem cells from the hair follicle cell lineage, hair follicle tissue regeneration and formation (hair growth), and for protecting from hair follicle-related diseases, disorders, conditions or pathologies, PEP9 is a peptide of general formula AA¹-AA²-AA³-AA⁴-AA⁵-AA⁶-AA⁷-PEP5; wherein PEP5 is a peptide of formula PEP3-AA¹¹-AA¹²; wherein PEP3 is selected from the group consisting of VPT, VPE, APT, TPT, VPA, APV, VPQ, VSQ and

[0438] SRV; wherein AA¹¹ is selected from the group consisting of E, K, Q, R, A, D, G and H, in particular is selected from the group consisting of E, K, Q, R, A, D and H; wherein AA¹² is selected from the group consisting of L, M, T, E, Q and H, in particular is selected from the group consisting of L, M, T, E and H; wherein AA¹, AA², AA³, AA⁴, and AA⁵ are independently absent or AA^{I} as defined herein; wherein AA⁶ is absent or selected from the group consisting of S, T, C, E, Q, P and R, preferably is selected from the group consisting of C, S, T, E and Q; wherein AA⁷ is selected from the group consisting of S, T, C, E, Q, P and R, preferably is selected from the group consisting of S, C and P. In one particular example, PEP9 is selected from the group consisting of KIPKAXXVPTEL, GIPEPXXVPEKM, SIPKAXXVPTEL, HVTKPTXAPTKL, YVPKPXXAPTKL, TVPKPXXAPTQL, AVPKAXXAPTKL, KVGKAXXVPTKL, KASKAXXVPTKL, GSAGPXXTPTKM, AAPASXXVPARL, STPPTXXVPTRL, HVPKPXXAPTKL, RVPSTXXAPVKT, ASAAPXXVPQAL, ASASPXXVSQDL, ASASPXXVPQDL, NDEGLEXVPTEE and SSVKXQPSRVHH.

[0439] In certain embodiments useful for inducing differentiation of mensenchymal or progenitor stem cells from the hair follicle cell lineage, hair follicle tissue regeneration and formation (hair growth), and for protecting from hair follicle-related diseases, disorders, conditions or pathologies, PEP12 is a peptide of general formula PEP1-AA¹⁷-PEP11; wherein AA¹⁷ is selected from the group consisting of G, A, V, L, I, P, F, M, W, T and S (in particular is selected from the group consisting of M, I, L, V and T); wherein PEP1 is SSLS.

[0440] In certain embodiments useful for inducing differentiation of mensenchymal or progenitor stem cells from the hair follicle cell lineage, hair follicle tissue regeneration and formation (hair growth), and for protecting from hair follicle-related diseases, disorders, conditions or pathologies, PEP11 is a peptide with 3 amino acids of general formula AA¹⁸-AA¹⁹-AA²⁰; wherein AA¹⁸ is selected from the group consisting of L, V, Q, A and R, in particular is L; wherein AA¹⁹ is selected from the group consisting of F, W, H, Y, I and K, in particular is F; wherein AA²⁰ is selected from the group consisting of L, F, Y, K, I, V and M, in particular is F. In one particular example, PEP11 is LFF.

[0441] In certain embodiments useful for inducing differentiation of mensenchymal or progenitor stem cells from the hair follicle cell lineage, hair follicle tissue regeneration and formation (hair growth), and for protecting from hair follicle-related diseases, disorders, conditions or pathologies, PEP1 is SSLS and PEP11 is LFF.

[0442] The definitions of “PEP” pairs and triplets e.g. PEP3:PEP1, PEP5:PEP12, or PEP7:PEP5:PEP1, also most particularly useful for inducing differentiation of mensenchymal or progenitor stem cells from the hair follicle cell lineage, hair follicle tissue regeneration and formation (hair growth), and for protecting from hair follicle-related diseases, disorders, conditions or pathologies, are as already defined herein to the extent that PEP1, PEP3, PEP5, PEP7, PEP9, PEP11 and PEP12 are particularly useful for these applications as defined in the present fertility and reproduction section.

[0443] In certain embodiments useful for inducing differentiation of mensenchymal or progenitor stem cells from the hair follicle cell lineage, hair follicle tissue regeneration and formation (hair growth), and for protecting from hair follicle-related diseases, disorders, conditions or pathologies, said GFR-binding compound is a synthetic molecule as defined herein in the definition section.

[0444] In certain embodiments useful for inducing differentiation of mensenchymal or progenitor stem cells from the hair follicle cell lineage, hair follicle tissue regeneration and formation (hair growth), and for protecting from hair follicle-related diseases, disorders, conditions or pathologies, said GFR-binding compound is a synthetic peptide, or a variant or analog thereof, or a peptidomimetic.

[0445] Fertility and Reproduction

[0446] Certain embodiments of the invention are particularly useful for inducing differentiation of mensenchymal or progenitor stem cells from the reproduction system lineage, enhancing female fertility, treating, preventing, decreasing or suppressing female infertility or any diseases, conditions, disorders or pathologies related thereof.

[0447] In certain embodiments useful for inducing differentiation of mensenchymal or progenitor stem cells from the reproduction system lineage, enhancing female fertility, treating, preventing, decreasing or suppressing female infertility or any diseases, conditions, disorders or pathologies related thereof, PEP1 is NAIS.

[0448] In certain embodiments useful for inducing differentiation of mensenchymal or progenitor stem cells from the reproduction system lineage, enhancing female fertility, treating, preventing, decreasing or suppressing female infertility or any diseases, conditions, disorders or pathologies related thereof, PEP3 is selected from the group consisting of VPT, APT, TPT, VPA and APV.

[0449] In certain embodiments useful for inducing differentiation of mensenchymal or progenitor stem cells from the reproduction system lineage, enhancing female fertility, treating, preventing, decreasing or suppressing female infertility or any diseases, conditions, disorders or pathologies related thereof, PEP5 is a peptide of general formula PEP3-AA¹¹-AA¹²; wherein PEP3 is selected from the group consisting of VPT, APT, TPT, VPA and APV; wherein AA¹¹ is selected from the group consisting of E, K, Q, R, A, D, G and H, in particular is selected from the group consisting of E, K, Q and R; wherein AA¹² is selected from the group consisting of L, M, T, E, Q and H, in particular is selected from the group consisting of L, M and T. In one particular example, PEP5 is selected from the group consisting of VPTEL, APTKL, APTKL, VPTKL, TPTKM, VPARL, VPTRL and APVKT.

[0450] In certain embodiments useful for inducing differentiation of mensenchymal or progenitor stem cells from the reproduction system lineage, enhancing female fertility, treating, preventing, decreasing or suppressing female infertility or any diseases, conditions, disorders or pathologies related thereof, PEP7 is an amino acid or a peptide with between two and seven amino acids of general formula AA¹-AA²-AA³-AA⁴-AA⁵-AA⁶-AA⁷; wherein AA¹, AA², AA³, AA⁴, and AA⁵ are independently absent or AA^{I} as defined herein; wherein AA⁶ is absent or selected from the group consisting of S, T, C, E, Q, P and R, preferably is selected from the group consisting of C, S and T; wherein AA⁷ is absent or is selected from the group consisting of S, T, C, E, Q, P and R, preferably is selected from the group consisting of S and C; and wherein at least one of AA¹, AA², AA³, AA⁴, AA⁵, AA⁶ or AA⁷ is not absent. In one particular example, PEP7 is selected from the group consisting of KIPKAXX, SIPKAXX, HVTKPTX, YVPKPXX, TVPKPXX, AVPKAXX, KVGKAXX, KASKAXX, GSAGPXX, AAPASXX, STPPTXX, HVPKPXX and RVPSTXX.

[0451] In certain embodiments useful for inducing differentiation of mensenchymal or progenitor stem cells from the reproduction system lineage, enhancing female fertility, treating, preventing, decreasing or suppressing female infertility or any diseases, conditions, disorders or pathologies related thereof, PEP9 is a peptide of general formula AA¹-AA²-AA³-AA⁴-AA⁵-AA⁶-AA⁷-PEP5; wherein PEP5 is a peptide of formula PEP3-AA¹¹-AA¹²; wherein PEP3 is selected from the group consisting of VPT, APT, TPT, VPA and APV; wherein AA¹¹ is selected from the group consisting of E, K, Q, R, A, D, G and H, in particular is selected from the group consisting of E, K, Q and R; wherein AA¹² is selected from the group consisting of L, M, T, E, Q and H, in particular is selected from the group consisting of L, M and T; wherein AA¹, AA², AA³, AA⁴, and AA⁵ are independently absent or AA^{I} as defined herein; wherein AA⁶ is absent or selected from the group consisting of S, T, C, E, Q, P and R, preferably is selected from the group consisting of C, S and T; wherein AA⁷ is selected from the group consisting of S, T, C, E, Q, P and R, preferably is selected from the group consisting of S and C. In one particular example, PEP9 is selected from the group consisting of KIPKAXXVPTEL, SIPKAXXVPTEL, HVTKPTXAPTKL, YVPKPXXAPTKL, TVPKPXXAPTQL, AVPKAXXAPTKL, KVGKAXXVPTKL, KASKAXXVPTKL, GSAGPXXTPTKM, AAPASXXVPARL, STPPTXXVPTRL, HVPKPXXAPTKL and RVPSTXXAPVKT.

[0452] In certain embodiments useful for inducing differentiation of mensenchymal or progenitor stem cells from the reproduction system lineage, enhancing female fertility, treating, preventing, decreasing or suppressing female infertility or any diseases, conditions, disorders or pathologies related thereof, PEP12 is a peptide of general formula PEP1-AA¹⁷-PEP11; wherein AA¹⁷ is selected from the group consisting of G, A, V, L, I, P, F, M, W, T and S (in particular is selected from the group consisting of M, I, L, V and T); wherein PEP1 is NAIS.

[0453] In certain embodiments useful for inducing differentiation of mensenchymal or progenitor stem cells from the reproduction system lineage, enhancing female fertility, treating, preventing, decreasing or suppressing female infertility or any diseases, conditions, disorders or pathologies related thereof, PEP11 is a peptide with 3 amino acids of general formula AA¹⁸-AA¹⁹-AA²⁰; wherein AA¹⁸ is selected from the group consisting of L, V, Q, A and R, in particular is L; wherein AA¹⁹ is selected from the group consisting of F, W, H, Y, I and K, in particular is Y; wherein AA²⁰ is selected from the group consisting of L, F, Y, K, I, V and M, in particular is F. In one particular example, PEP11 is LYF.

[0454] In certain embodiments useful for inducing differentiation of mensenchymal or progenitor stem cells from the reproduction system lineage, enhancing female fertility, treating, preventing, decreasing or suppressing female infertility or any diseases, conditions, disorders or pathologies related thereof, PEP1 is NAIS and PEP11 is LYF.

[0455] The definitions of “PEP” pairs and triplets e.g. PEP3:PEP1, PEP5:PEP12, or PEP7:PEP5:PEP1, also most particularly useful for inducing differentiation of mensenchymal or progenitor stem cells from the reproduction system lineage, enhancing female fertility, treating, preventing, decreasing or suppressing female infertility or any diseases, conditions, disorders or pathologies related thereof, are as already defined herein to the extent that PEP1, PEP3, PEP5, PEP7, PEP9, PEP11 and PEP12 are particularly useful for these applications as defined in the present fertility and reproduction section.

[0456] In certain embodiments useful for inducing differentiation of mensenchymal or progenitor stem cells from the reproduction system lineage, enhancing female fertility, treating, preventing, decreasing or suppressing female infertility or any diseases, conditions, disorders or pathologies related thereof, said GFR-binding compound is a synthetic molecule as defined herein in the definition section.

[0457] In certain embodiments useful for inducing differentiation of mensenchymal or progenitor stem cells from the reproduction system lineage, enhancing female fertility, treating, preventing, decreasing or suppressing female infertility or any diseases, conditions, disorders or pathologies related thereof, said GFR-binding compound is a synthetic peptide, or a variant or analog thereof, or a peptidomimetic.

[0458] Lung

[0459] Certain embodiments of the invention are particularly useful for inducing differentiation of mensenchymal or progenitor stem cells from the lung cell lineage, regenerating lung tissues, and protecting patients from lung tissue degeneration-related diseases, conditions, disorders or pathologies.

[0460] In certain embodiments useful for inducing differentiation of mensenchymal or progenitor stem cells from the lung cell lineage, regenerating lung tissues, and protecting patients from lung tissue degeneration-related diseases, conditions, disorders or pathologies, PEP1 is selected from the group consisting of NAIS, SATS, SPIS, EPIS and SPIN.

[0461] In certain embodiments useful for inducing differentiation of mensenchymal or progenitor stem cells from the lung cell lineage, regenerating lung tissues, and protecting patients from lung tissue degeneration-related diseases, conditions, disorders or pathologies, PEP3 is selected from the group consisting of VPT, VPE, APT, TPT, VPA, APV, VPQ and VSQ.

[0462] In certain embodiments useful for inducing differentiation of mensenchymal or progenitor stem cells from the lung cell lineage, regenerating lung tissues, and protecting patients from lung tissue degeneration-related diseases, conditions, disorders or pathologies, PEP5 is a peptide of general formula PEP3-AA¹¹-AA¹²; wherein PEP3 is selected from the group consisting of VPT, VPE, APT, TPT, VPA, APV, VPQ and VSQ; wherein AA¹¹ is selected from the group consisting of E, K, Q, R, A, D, G and H, in particular is selected from the group consisting of E, K, Q, R, A and D; wherein AA¹² is selected from the group consisting of L, M, T, E, Q and H, in particular selected from the group consisting of L, M and T. In one particular example, PEP5 is selected from the group consisting of VPTEL, VPEKM, APTKL, APTKL, VPTKL, TPTKM, VPARL, VPTRL, APVKT, VPQAL, VSQDL and VPQDL.

[0463] In certain embodiments useful for inducing differentiation of mensenchymal or progenitor stem cells from the lung cell lineage, regenerating lung tissues, and protecting patients from lung tissue degeneration-related diseases, conditions, disorders or pathologies, PEP7 is an amino acid or a peptide with between two and seven amino acids of general formula AA¹-AA²-AA³-AA⁴-AA⁵-AA⁶-AA⁷; wherein AA¹, AA², AA³, AA⁴, and AA⁵ are independently absent or AA^{I} as defined herein; wherein AA⁶ is absent or selected from the group consisting of S, T, C, E, Q, P and R, preferably is selected from the group consisting of C, S and T; wherein AA⁷ is absent or is selected from the group consisting of S, T, C, E, Q, P and R, preferably is C or S; and wherein at least one of AA¹, AA², AA³, AA⁴, AA⁵, AA⁶ or AA⁷ is not absent. In one particular example, PEP7 is selected from the group consisting of KIPKAXX, GIPEPXX, SIPKAXX, HVTKPTX, YVPKPXX, TVPKPXX, AVPKAXX, KVGKAXX, KASKAXX, GSAGPXX, AAPASXX, STPPTXX, HVPKPXX, RVPSTXX, ASAAPXX and ASASPXX.

[0464] In certain embodiments useful for inducing differentiation of mensenchymal or progenitor stem cells from the lung cell lineage, regenerating lung tissues, and protecting patients from lung tissue degeneration-related diseases, conditions, disorders or pathologies, PEP9 is a peptide of general formula AA¹-AA²-AA³-AA⁴-AA⁵-AA⁶-AA⁷-PEP5; wherein PEP5 is a peptide of formula PEP3-AA¹¹-AA¹²; wherein PEP3 is selected from the group consisting of VPT, VPE, APT, TPT, VPA, APV, VPQ and VSQ; wherein AA¹¹ is selected from the group consisting of E, K, Q, R, A, D, G and H, in particular E, K, Q, R, A and D; wherein AA¹² is selected from the group consisting of L, M, T, E, Q and H, in particular selected from the group consisting of L, M and T; wherein AA¹, AA², AA³, AA⁴, and AA⁵ are independently absent or AA^{I} as defined herein; wherein AA⁶ is absent or selected from the group consisting of S, T, C, E, Q, P and R, preferably is selected from the group consisting of C, S and T; wherein AA^{I} is selected from the group consisting of S, T, C, E, Q, P and R, preferably is C or S. In one particular example, PEP9 is selected from the group consisting of KIPKAXXVPTEL, GIPEPXXVPEKM, SIPKAXXVPTEL, HVTKPTXAPTKL, YVPKPXXAPTKL, TVPKPXXAPTQL, AVPKAXXAPTKL, KVGKAXXVPTKL, KASKAXXVPTKL, GSAGPXXTPTKM, AAPASXXVPARL, STPPTXXVPTRL, HVPKPXXAPTKL, RVPSTXXAPVKT, ASAAPXXVPQAL, ASASPXXVSQDL and ASASPXXVPQDL.

[0465] In certain embodiments useful for inducing differentiation of mensenchymal or progenitor stem cells from the lung cell lineage, regenerating lung tissues, and protecting patients from lung tissue degeneration-related diseases, conditions, disorders or pathologies, PEP12 is a peptide of general formula PEP1-AA¹⁷-PEP11; wherein AA¹⁷ is selected from the group consisting of G, A, V, L, I, P, F, M, W, T and S (in particular is selected from the group consisting of M, I, L, V and T); wherein PEP1 is selected from the group consisting of NAIS, SATS, SPIS, EPIS and SPIN.

[0466] In certain embodiments useful for inducing differentiation of mensenchymal or progenitor stem cells from the lung cell lineage, regenerating lung tissues, and protecting patients from lung tissue degeneration-related diseases, conditions, disorders or pathologies, PEP11 is a peptide with 3 amino acids of general formula AA¹⁸-AA¹⁹-AA²⁰; wherein AA¹⁸ is selected from the group consisting of L, V, Q, A and R, in particular is L; wherein AA¹⁹ is selected from the group consisting of F, W, H and Y (in particular is a polar aromatic amino acid such as Y); wherein AA²⁰ is selected from the group consisting of L, F, Y, K, I, V and M, in particular is selected from the group consisting of L, F, Y, and K. In one particular example, PEP11 is selected from the group consisting of LYF, LYY, LYK and LYL.

[0467] In certain embodiments useful for inducing differentiation of mensenchymal or progenitor stem cells from the lung cell lineage, regenerating lung tissues, and protecting patients from lung tissue degeneration-related diseases, conditions, disorders or pathologies, PEP1 is selected from the group consisting of NAIS, SATS, SPIS, EPIS and SPIN; PEP11 is selected from the group consisting of LYF, LYY, LYK and LYL; and the pair PEP1:PEP11 is selected from the group consisting of NAIS:LYF, SATS:LYY, SPIS:LYK, EPIS:LYL and SPIN:LYF.

[0468] The definitions of “PEP” pairs and triplets e.g. PEP3:PEP1, PEP5:PEP12, or PEP7:PEP5:PEP1, also most particularly useful for inducing differentiation of mensenchymal or progenitor stem cells from the lung cell lineage, regenerating lung tissues, and protecting patients from lung tissue degeneration-related diseases, conditions, disorders or pathologies, are as already defined herein to the extent that PEP1, PEP3, PEP5, PEP7, PEP9, PEP11 and PEP12 are particularly useful for these applications as defined in the present lung section.

[0469] In certain embodiments useful for inducing differentiation of mensenchymal or progenitor stem cells from the lung cell lineage, regenerating lung tissues, and protecting patients from lung tissue degeneration-related diseases, conditions, disorders or pathologies, said GFR-binding compound is a synthetic molecule as defined herein in the definition section.

[0470] In certain embodiments useful for inducing differentiation of mensenchymal or progenitor stem cells from the lung cell lineage, regenerating lung tissues, and protecting patients from lung tissue degeneration-related diseases, conditions, disorders or pathologies, said GFR-binding compound is a synthetic peptide, or a variant or analog thereof, or a peptidomimetic.

[0471] Muscle

[0472] Certain embodiments of the invention are particularly useful for inducing differentiation of mensenchymal or progenitor stem cells from the muscle cell lineage, regenerating muscle tissues, enhancing of myogenesis, reinforcing muscle tissues, repairing damaged muscles, and protecting a subject from one or more muscle tissue degeneration-related diseases, disorders, conditions or pathologies.

[0473] In certain embodiments useful for inducing differentiation of mensenchymal or progenitor stem cells from the muscle cell lineage, regenerating muscle tissues, enhancing of myogenesis, reinforcing muscle tissues, repairing damaged muscles, and protecting a subject from one or more muscle tissue degeneration-related diseases, disorders, conditions or pathologies, PEP1 is RSVK or RPVQ.

[0474] In certain embodiments useful for inducing differentiation of mensenchymal or progenitor stem cells from the muscle cell lineage, regenerating muscle tissues, enhancing of myogenesis, reinforcing muscle tissues, repairing damaged muscles, and protecting a subject from one or more muscle tissue degeneration-related diseases, disorders, conditions or pathologies, PEP3 is selected from the group consisting of VPQ, VSQ and VPT.

[0475] In certain embodiments useful for inducing differentiation of mensenchymal or progenitor stem cells from the muscle cell lineage, regenerating muscle tissues, enhancing of myogenesis, reinforcing muscle tissues, repairing damaged muscles, and protecting a subject from one or more muscle tissue degeneration-related diseases, disorders, conditions or pathologies, PEP5 is a peptide of general formula PEP3-AA¹¹-AA¹²; wherein PEP3 is selected from the group consisting of VPQ, VSQ and VPT; wherein AA¹¹ is selected from the group consisting of E, K, Q, R, A, D, G and H, in particular A, D, E and G; wherein AA¹² is selected from the group consisting of L, M, T, E, Q and H, in particular L, E and Q. In one particular example, PEP5 is selected from the group consisting of VPQAL, VSQDL, VPQDL, VPTEE and VPTGQ.

[0476] In certain embodiments useful for inducing differentiation of mensenchymal or progenitor stem cells from the muscle cell lineage, regenerating muscle tissues, enhancing of myogenesis, reinforcing muscle tissues, repairing damaged muscles, and protecting a subject from one or more muscle tissue degeneration-related diseases, disorders, conditions or pathologies, PEP7 is an amino acid or a peptide with between two and seven amino acids of general formula AA¹-AA²-AA³-AA⁴-AA⁵-AA⁶-AA⁷; wherein AA¹, AA², AA³, AA⁴, and AA⁵ are independently absent or AA^{I} as defined herein; wherein AA⁶ is absent or selected from the group consisting of S, T, C, E, Q, P and R, preferably C, S, or E; wherein AA⁷ is absent or is selected from the group consisting of S, T, C, E, Q, P and R, preferably is S or C; and wherein at least one of AA¹, AA², AA³, AA⁴, AA⁵, AA⁶ or AA⁷ is not absent. In one particular example, PEP7 is selected from the group consisting of ASAAPXX, ASASPXX and NDEGLEX.

[0477] In certain embodiments useful for inducing differentiation of mensenchymal or progenitor stem cells from the muscle cell lineage, regenerating muscle tissues, enhancing of myogenesis, reinforcing muscle tissues, repairing damaged muscles, and protecting a subject from one or more muscle tissue degeneration-related diseases, disorders, conditions or pathologies, PEP9 is a peptide of general formula AA¹-AA²-AA³-AA⁴-AA⁵-AA⁶-AA⁷-PEP5; wherein PEP5 is a peptide of formula PEP3-AA¹¹-AA¹²; wherein PEP3 is selected from the group consisting of VPQ, VSQ and VPT; wherein AA¹¹ is selected from the group consisting of E, K, Q, R, A, D, G and H, in particular A, D, E and G; wherein AA¹² is selected from the group consisting of L, M, T, E, Q and H, in particular L, E and Q; wherein AA¹, AA², AA³, AA⁴, and AA⁵ are independently absent or AA^{I} as defined herein; wherein AA⁶ is absent or selected from the group consisting of S, T, C, E, Q, P and R, preferably C, S, or E; wherein AA⁷ is selected from the group consisting of S, T, C, E, Q, P and R, preferably is S or C. In one particular example, PEP9 is selected from the group consisting of ASAAPXXVPQAL, ASASPXXVSQDL, ASASPXXVPQDL, NDEGLEXVPTEE and NDEGLEXVPTGQ.

[0478] In certain embodiments useful for inducing differentiation of mensenchymal or progenitor stem cells from the muscle cell lineage, regenerating muscle tissues, enhancing of myogenesis, reinforcing muscle tissues, repairing damaged muscles, and protecting a subject from one or more muscle tissue degeneration-related diseases, disorders, conditions or pathologies, PEP12 is a peptide of general formula PEP1-AA¹⁷-PEP11; wherein AA¹⁷ is selected from the group consisting of G, A, V, L, I, P, F, M, W, T and S (in particular is I or M); wherein PEP1 is RSVK or RPVQ.

[0479] In certain embodiments useful for inducing differentiation of mensenchymal or progenitor stem cells from the muscle cell lineage, regenerating muscle tissues, enhancing of myogenesis, reinforcing muscle tissues, repairing damaged muscles, and protecting a subject from one or more muscle tissue degeneration-related diseases, disorders, conditions or pathologies, PEP11 is a peptide with 3 amino acids of general formula AA¹⁸-AA¹⁹-AA²⁰; wherein AA¹⁸ is selected from the group consisting of L, V, Q, A and R, in particular is A or R; wherein AA¹⁹ is selected from the group consisting of AA^{VII} amino acids (in particular is K); wherein AA²⁰ is selected from the group consisting of L, F, Y, K, I, V and M, in particular is V or I. In one particular example, PEP11 is AKV or RKI.

[0480] In certain embodiments useful for inducing differentiation of mensenchymal or progenitor stem cells from the muscle cell lineage, regenerating muscle tissues, enhancing of myogenesis, reinforcing muscle tissues, repairing damaged muscles, and protecting a subject from one or more muscle tissue degeneration-related diseases, disorders, conditions or pathologies, PEP1 is RSVK or RPVQ; PEP11 is is AKV or RKI; and the pair PEP1:PEP11 is RSVK:AKV or RPVQ:RKI.

[0481] The definitions of “PEP” pairs and triplets e.g. PEP3:PEP1, PEP5:PEP12, or PEP7:PEP5:PEP1, also most particularly embodiments useful for inducing differentiation of mensenchymal or progenitor stem cells from the muscle cell lineage, regenerating muscle tissues, enhancing of myogenesis, reinforcing muscle tissues, repairing damaged muscles, and protecting a subject from one or more muscle tissue degeneration-related diseases, disorders, conditions or pathologies, are as already defined herein to the extent that PEP1, PEP3, PEP5, PEP7, PEP9, PEP11 and PEP12 are particularly useful for these applications as defined in the present muscle section.

[0482] In certain embodiments useful for inducing differentiation of mensenchymal or progenitor stem cells from the muscle cell lineage, regenerating muscle tissues, enhancing of myogenesis, reinforcing muscle tissues, repairing damaged muscles, and protecting a subject from one or more muscle tissue degeneration-related diseases, disorders, conditions or pathologies, said GFR-binding compound is a synthetic molecule as defined herein in the definition section.

[0483] In certain embodiments useful for inducing differentiation of mensenchymal or progenitor stem cells from the muscle cell lineage, regenerating muscle tissues, enhancing of myogenesis, reinforcing muscle tissues, repairing damaged muscles, and protecting a subject from one or more muscle tissue degeneration-related diseases, disorders, conditions or pathologies, said GFR-binding compound is a synthetic peptide, or a variant or analog thereof, or a peptidomimetic.

[0484] Blood

[0485] Certain embodiments of the invention are particularly useful for inducing differentiation of mensenchymal or progenitor stem cells from the blood cell lineage, regenerating blood tissues, and protecting patients from blood cell degeneration-related disease, conditions, disorders or pathologies.

[0486] In certain embodiments useful for inducing differentiation of mensenchymal or progenitor stem cells from the blood cell lineage, regenerating blood tissues, and protecting patients from blood cell degeneration-related disease, conditions, disorders or pathologies, PEP1 is SNIT.

[0487] In certain embodiments useful for inducing differentiation of mensenchymal or progenitor stem cells from the blood cell lineage, regenerating blood tissues, and protecting patients from blood cell degeneration-related disease, conditions, disorders or pathologies, PEP3 is selected from the group consisting of TPT, VPA, VPT, APT, APV, VPQ, VSQ, SRV and TQV.

[0488] In certain embodiments useful for inducing differentiation of mensenchymal or progenitor stem cells from the blood cell lineage, regenerating blood tissues, and protecting patients from blood cell degeneration-related disease, conditions, disorders or pathologies, PEP5 is a peptide of general formula PEP3-AA¹¹-AA¹²; wherein PEP3 is selected from the group consisting of TPT, VPA, VPT, APT, APV, VPQ, VSQ, SRV and TQV; wherein AA¹¹ is selected from the group consisting of E, K, Q, R, A, D, G and H, in particular is selected from the group consisting of K, R, A, D, H and Q; wherein AA¹² is selected from the group consisting of L, M, T, E, Q and H, in particular is selected from the group consisting of M, L, T and H. In one particular example, PEP5 is selected from the group consisting of TPTKM, VPARL, VPTRL, APTKL, APVKT, VPQAL, VSQDL, VPQDL, SRVHH and TQVQL.

[0489] In certain embodiments useful for inducing differentiation of mensenchymal or progenitor stem cells from the blood cell lineage, regenerating blood tissues, and protecting patients from blood cell degeneration-related disease, conditions, disorders or pathologies, PEP7 is an amino acid or a peptide with between two and seven amino acids of general formula AA¹-AA²-AA³-AA⁴-AA⁵-AA⁶-AA⁷; wherein AA¹, AA², AA³, AA⁴, and AA⁵ are independently absent or AA^{I} as defined herein; wherein AA⁶ is absent or selected from the group consisting of S, T, C, E, Q, P and R, preferably is selected from the group consisting of S, C, Q and R; wherein AA⁷ is absent or is selected from the group consisting of S, T, C, E, Q, P and R, preferably is selected from the group consisting of C, S and P; and wherein at least one of AA¹, AA², AA³, AA⁴, AA⁵, AA⁶ or AA⁷ is not absent. In one particular example, PEP7 is selected from the group consisting of GSAGPXX, AAPASXX, STPPTXX, HVPKPXX, RVPSTXX, ASAAPXX, ASASPXX, SSVKXQP and RNVQXRP.

[0490] In certain embodiments useful for inducing differentiation of mensenchymal or progenitor stem cells from the blood cell lineage, regenerating blood tissues, and protecting patients from blood cell degeneration-related disease, conditions, disorders or pathologies, PEP9 is a peptide of general formula AA¹-AA²-AA³-AA⁴-AA⁵-AA⁶-AA⁷-PEP5; wherein PEP5 is a peptide of formula PEP3-AA¹¹-AA¹²; wherein PEP3 is selected from the group consisting of TPT, VPA, VPT, APT, APV, VPQ, VSQ, SRV and TQV; wherein AA¹¹ is selected from the group consisting of E, K, Q, R, A, D, G and H, in particular is selected from the group consisting of K, R, A, D, H and Q; wherein AA¹² is selected from the group consisting of L, M, T, E, Q and H, in particular is selected from the group consisting of M, L, T and H; wherein AA¹, AA², AA³, AA⁴, and AA⁵ are independently absent or AA^{I} as defined herein; wherein AA⁶ is absent or selected from the group consisting of S, T, C, E, Q, P and R, preferably is selected from the group consisting of S, C, Q and R; wherein AA⁷ is selected from the group consisting of S, T, C, E, Q, P and R, preferably is selected from the group consisting of C, S and P. In one particular example, PEP9 is selected from the group consisting of GSAGPXXTPTKM, AAPASXXVPARL, STPPTXXVPTRL, HVPKPXXAPTKL, RVPSTXXAPVKT, ASAAPXXVPQAL, ASASPXXVSQDL, ASASPXXVPQDL, SSVKXQPSRVHH and RNVQXRPTQVQL.

[0491] In certain embodiments useful for inducing differentiation of mensenchymal or progenitor stem cells from the blood cell lineage, regenerating blood tissues, and protecting patients from blood cell degeneration-related disease, conditions, disorders or pathologies, PEP12 is a peptide of general formula PEP1-AA¹⁷-PEP11; wherein AA¹⁷ is selected from the group consisting of G, A, V, L, I, P, F, M, W, T and S (in particular is selected from the group consisting of M, I, V and T); wherein PEP1 is SNIT.

[0492] In certain embodiments useful for inducing differentiation of mensenchymal or progenitor stem cells from the blood cell lineage, regenerating blood tissues, and protecting patients from blood cell degeneration-related disease, conditions, disorders or pathologies, PEP11 is a peptide with 3 amino acids of general formula AA¹⁸-AA¹⁹-AA²⁰; wherein AA¹⁸ is selected from the group consisting of L, V, Q, A and R, in particular is Q; wherein AA¹⁹ is selected from the group consisting of F, W, H, I and Y (in particular is I); wherein AA²⁰ is selected from the group consisting of L, F, Y, K, I, V and M, in particular is M. In one particular example, PEP11 is QIM.

[0493] In certain embodiments useful for inducing differentiation of mensenchymal or progenitor stem cells from the blood cell lineage, regenerating blood tissues, and protecting patients from blood cell degeneration-related disease, conditions, disorders or pathologies, PEP1 is SNIT and PEP11 is QIM.

[0494] The definitions of “PEP” pairs and triplets e.g. PEP3:PEP1, PEP5:PEP12, or PEP7:PEP5:PEP1, also most particularly embodiments useful for inducing differentiation of mensenchymal or progenitor stem cells from the blood cell lineage, regenerating blood tissues, and protecting patients from blood cell degeneration-related disease, conditions, disorders or pathologies, are as already defined herein to the extent that PEP1, PEP3, PEP5, PEP7, PEP9, PEP11 and PEP12 are particularly useful for these applications as defined in the present blood section.

[0495] In certain embodiments useful for inducing differentiation of mensenchymal or progenitor stem cells from the blood cell lineage, regenerating blood tissues, and protecting patients from blood cell degeneration-related disease, conditions, disorders or pathologies, said GFR-binding compound is a synthetic molecule as defined herein in the definition section.

[0496] In certain embodiments useful for inducing differentiation of mensenchymal or progenitor stem cells from the blood cell lineage, regenerating blood tissues, and protecting patients from blood cell degeneration-related disease, conditions, disorders or pathologies, said GFR-binding compound is a synthetic peptide, or a variant or analog thereof, or a peptidomimetic.

[0497] Adipose Tissues

[0498] Certain embodiments of the invention are particularly useful for inducing differentiation of mensenchymal or progenitor stem cells from the adipocyte lineage, regenerating adipose tissues and protecting patients from adipose tissue degeneration-related diseases, conditions, disorders or pathologies.

[0499] In certain embodiments useful for inducing differentiation of mensenchymal or progenitor stem cells from the adipocyte lineage, regenerating adipose tissues and protecting patients from adipose tissue degeneration-related diseases, conditions, disorders or pathologies, PEP1 is SAIS or NAIS.

[0500] In certain embodiments useful for inducing differentiation of mensenchymal or progenitor stem cells from the adipocyte lineage, regenerating adipose tissues and protecting patients from adipose tissue degeneration-related diseases, conditions, disorders or pathologies, PEP3 is selected from the group consisting of VPT, VPE, APT, TPT, VPA, APV, VPQ and VSQ.

[0501] In certain embodiments useful for inducing differentiation of mensenchymal or progenitor stem cells from the adipocyte lineage, regenerating adipose tissues and protecting patients from adipose tissue degeneration-related diseases, conditions, disorders or pathologies, PEP5 is a peptide of general formula PEP3-AA¹¹-AA¹²; wherein PEP3 is selected from the group consisting of VPT, VPE, APT, TPT, VPA, APV, VPQ and VSQ; wherein AA¹¹ is selected from the group consisting of E, K, Q, R, A, D, G and H, in particular is selected from the group consisting of E, K, Q, R, A and D; wherein AA¹² is selected from the group consisting of L, M, T, E, Q and H, in particular selected from the group consisting of L, M and T. In one particular example, PEP5 is selected from the group consisting of VPTEL, VPEKM, APTKL, APTKL, VPTKL, TPTKM, VPARL, VPTRL, APVKT, VPQAL, VSQDL and VPQDL.

[0502] In certain embodiments useful for inducing differentiation of mensenchymal or progenitor stem cells from the adipocyte lineage, regenerating adipose tissues and protecting patients from adipose tissue degeneration-related diseases, conditions, disorders or pathologies, PEP7 is an amino acid or a peptide with between two and seven amino acids of general formula AA¹-AA²-AA³-AA⁴-AA⁵-AA⁶-AA⁷; wherein AA¹, AA², AA³, AA⁴, and AA⁵ are independently absent or AA^{I} as defined herein; wherein AA⁶ is absent or selected from the group consisting of S, T, C, E, Q, P and R, preferably is selected from the group consisting of C, S and T; wherein AA⁷ is absent or is selected from the group consisting of S, T, C, E, Q, P and R, preferably is C or S; and wherein at least one of AA¹, AA², AA³, AA⁴, AA⁵, AA⁶ or AA⁷ is not absent. In one particular example, PEP7 is selected from the group consisting of KIPKAXX, GIPEPXX, SIPKAXX, HVTKPTX, YVPKPXX, TVPKPXX, AVPKAXX, KVGKAXX, KASKAXX, GSAGPXX, AAPASXX, STPPTXX, HVPKPXX, RVPSTXX, ASAAPXX and ASASPXX.

[0503] In certain embodiments useful for inducing differentiation of mensenchymal or progenitor stem cells from the adipocyte lineage, regenerating adipose tissues and protecting patients from adipose tissue degeneration-related diseases, conditions, disorders or pathologies, PEP9 is a peptide of general formula AA¹-AA²-AA³-AA⁴-AA⁵-AA⁶-AA⁷-PEP5; wherein PEP5 is a peptide of formula PEP3-AA¹¹-AA¹²; wherein PEP3 is selected from the group consisting of VPT, VPE, APT, TPT, VPA, APV, VPQ and VSQ; wherein AA¹¹ is selected from the group consisting of E, K, Q, R, A, D, G and H, in particular E, K, Q, R, A and D; wherein AA¹² is selected from the group consisting of L, M, T, E, Q and H, in particular selected from the group consisting of L, M and T; wherein AA¹, AA², AA³, AA⁴, and AA⁵ are independently absent or AA^{I} as defined herein; wherein AA⁶ is absent or selected from the group consisting of S, T, C, E, Q, P and R, preferably is selected from the group consisting of C, S and T; wherein AA⁷ is selected from the group consisting of S, T, C, E, Q, P and R, preferably is C or S. In one particular example, PEP9 is selected from the group consisting of KIPKAXXVPTEL, GIPEPXXVPEKM, SIPKAXXVPTEL, HVTKPTXAPTKL, YVPKPXXAPTKL, TVPKPXXAPTQL, AVPKAXXAPTKL, KVGKAXXVPTKL, KASKAXXVPTKL, GSAGPXXTPTKM, AAPASXXVPARL, STPPTXXVPTRL, HVPKPXXAPTKL, RVPSTXXAPVKT, ASAAPXXVPQAL, ASASPXXVSQDL and ASASPXXVPQDL.

[0504] In certain embodiments useful for inducing differentiation of mensenchymal or progenitor stem cells from the adipocyte lineage, regenerating adipose tissues and protecting patients from adipose tissue degeneration-related diseases, conditions, disorders or pathologies, PEP12 is a peptide of general formula PEP1-AA¹⁷-PEP11; wherein AA¹⁷ is selected from the group consisting of G, A, V, L, I, P, F, M, W, T and S (in particular is selected from the group consisting of M, V and T); wherein PEP1 is SAIS or NAIS.

[0505] In certain embodiments useful for inducing differentiation of mensenchymal or progenitor stem cells from the adipocyte lineage, regenerating adipose tissues and protecting patients from adipose tissue degeneration-related diseases, conditions, disorders or pathologies, PEP11 is a peptide with 3 amino acids of general formula AA¹⁸-AA¹⁹-AA²⁰; wherein AA¹⁸ is selected from the group consisting of L, V, Q, A and R, in particular is L; wherein AA¹⁹ is selected from the group consisting of F, W, H and Y (in particular is a polar aromatic amino acid such as Y); wherein AA²⁰ is selected from the group consisting of L, F, Y, K, I, V and M, in particular is L or F. In one particular example, PEP11 is LYL or LYF.

[0506] In certain embodiments useful for inducing differentiation of mensenchymal or progenitor stem cells from the adipocyte lineage, regenerating adipose tissues and protecting patients from adipose tissue degeneration-related diseases, conditions, disorders or pathologies, PEP1 is SAIS or NAIS; PEP11 is LYL or LYF; and the pair PEP1:PEP11 is SAIS:LYL or NAIS:LYF.

[0507] The definitions of “PEP” pairs and triplets e.g. PEP3:PEP1, PEP5:PEP12, or PEP7:PEP5:PEP1, also most particularly embodiments useful for inducing differentiation of mensenchymal or progenitor stem cells from the adipocyte lineage, regenerating adipose tissues and protecting patients from adipose tissue degeneration-related diseases, conditions, disorders or pathologies, are as already defined herein to the extent that PEP1, PEP3, PEP5, PEP7, PEP9, PEP11 and PEP12 are particularly useful for these applications as defined in the present adipose tissue section.

[0508] In certain embodiments useful for inducing differentiation of mensenchymal or progenitor stem cells from the adipocyte lineage, regenerating adipose tissues and protecting patients from adipose tissue degeneration-related diseases, conditions, disorders or pathologies, said GFR-binding compound is a synthetic molecule as defined herein in the definition section.

[0509] In certain embodiments useful for inducing differentiation of mensenchymal or progenitor stem cells from the adipocyte lineage, regenerating adipose tissues and protecting patients from adipose tissue degeneration-related diseases, conditions, disorders or pathologies, said GFR-binding compound is a synthetic peptide, or a variant or analog thereof, or a peptidomimetic.

[0510] Tissue Closure

[0511] In certain embodiments useful for promoting tissue closure, the choice of PEP1, PEP3, PEP5, PEP7, PEP9, PEP12, PEP11 and AA¹⁷ will depend on the type of specific tissue closure to be performed and may include any of the suitable amino acids, peptides, analog or variant thereof, or peptidomimetic, already disclosed herein with respect to the bone, cartilage, vascular, wound healing, neuronal, eye-retinal, kidneys, liver, LIT and skin applications. For instance, in certain embodiments, during bone repair surgery, different layers of tissue such as skin, muscle and blood vessel are incised in order to reach the damaged bone part. Thus, suitable PEP1, PEP3, PEP5, PEP7, PEP9, PEP12, PEP11 and AA¹⁷ for implementing embodiments of the invention in this specific situation may include such amino acids, peptides, analog or variant thereof, or peptidomimetic, already described herein with respect to skin, muscle, vascular and bone tissue regeneration/formation and cell migration. Likewise, for example, in certain embodiments, during heart surgery, different layers of tissue such as skin, muscle and blood vessel, are incised in order to reach the patient's heart. Thus, suitable PEP1, PEP3, PEP5, PEP7, PEP9, PEP12, PEP11 and AA¹⁷ for implementing embodiments of the invention in this specific situation include such amino acids, peptides, analog or variant thereof, or peptidomimetic, already described herein with respect to the skin, muscle and blood vessel tissue regeneration/formation and cell migration.

### III. Bioactive Carriers

[0512] The present invention may achieve its intended therapeutic and/or cosmetic action(s) e.g. through efficient tissue induction, by functional combination (or association) with a bioactive carrier.

[0513] In one example, said cyclic GFR-binding compound and said bioactive carrier are thus operably associated, combined, linked or connected as defined herein and thus may form a pharmaceutical, dermatological, prophylactic, diagnostic, imaging or cosmetic association or combination for uses and methods as defined herein.

[0514] As may be used herein, the term “bioactive carrier”, “biocompatible carrier”, “bioactive material”, “biocompatible material”, “bioactive substance”, “bio-substance”, “biocompatible substance”, are used interchangeably.

[0515] A suitable bioactive carrier is compatible with living cells, tissues, organs or systems posing little to no risk of injury, toxicity or rejection by the immune system. Bioactive carriers suitable for implementing embodiments of the present invention include, but are not limited to, (a) a biopolymer such as (al) collagen, (a2) fibrin; (b) a synthetic polymer such as (b1) ultra-high molecular weight polyethylene (UHMWPE), (b2) polyurethane (PE), (b3) polyurethane (PU), (b4) polytetrafuoroethylene (PTFE), (b5) polyacetal (PA), (b6) polymethylmethacrylate (PMMA), (b7) polyethylene terepthalate (PET), (b8) silicone rubber (SR), (b9) polyetheretherketone (PEEK), (b10) poly(lactic acid) (PLA), (b11) polysulfone (PS), (b12) PLLA, (b13) PLGA or (b14) PLDA; (c) metals and metal oxides such as (c1) gold and gold alloys, (c2) silver and silver alloys, (c3) platinum and platinum alloys, (c4) tantalum, (c5) Ti6Al4V, (c6) 316L stainless steel, (c7) Co—Cr Alloys, (c8) titanium alloys such as such as □-type, β-type, □+□-type Ti alloy, Ti—Nb alloys such as Ti29Nb13Ta4.6Zr or Ti35Nb4Sn); (d) metallic glasses; (e) amorphous alloys such as Zr-based alloys; (f) porous metals such as the ones reported in Ryan et al., 2006, Biomaterials, 27, 2651; Lopez-Heredia et al. 2008, Biomaterials, 29, 2608; Ryan et al., 2008, Biomaterials, 29, 3625; Li et al., 2007, Biomaterials, 28, 2810; or Hollander et al., 2006, Biomaterials, 27, 955; all being incorporated herein in their entirety; (g) gel or solid ceramics such as (g1) alumina, (g2) zirconia, (g3) carbon, (g4) titania, (g5) bioglass, or (g6) hydroxyapatite (HA); (h) composites such as (h1) silica/SR, (h2) CF/UHMWPE, (h3) CF/PTFE, (h4) HA/PE, (h5) CF/epoxy, (h6) CF/PEEK, (h7) CF/C or (h8) Al₂O₃/PTFE; (i) hydrogels such as (i1) polyisocyanopeptide hydrogels such as oligo(ethylene)glycol polyisocyanopeptides as described, for instance, in Van Buul, et al.; Chem. Sci. 4, 2357-2363 (2013), incorporated herein by reference in its entirety, (i2) polysaccharides such as alginates, chitosans, chitins, guar gums, pectins, gellan gums, heparins, carrageenans, hyaluronans, starches, agars, xanthan gums, methylcellulose, carboxymethylcellulose, hydroxypropyl methyl cellulose, (i3) polyglycols such as polyethyleneglycol or polypropyleneglycol, (i4) polyvinylpyrrolidone, (i5) poly(vinylalcohol), (i6) polyacrylic acids, (i7) glycerophosphates, (i8) 2-acrylamido-2-methylpropanesulfonic acid, (i9) polyphosphazenes; (j) other suitable materials such as demineralized bone matrix; and any combinations thereof.

[0516] Suitable sources of bioactive carriers for implementing embodiments of the present invention include, but are not limited to, autographs, allographs, xenographs, plants, solutions, excipients, ceramics, metals, metal alloys, organic and inorganic polymers, bioglasses, carbon-containing structures, or combination thereof.

[0517] Particularly suitable as bioactive carriers for implementing embodiments of the present invention include bioactive carriers comprising at least one naturally occurring hydroxyl group on at least one surface thereof and bioactive carriers which do not naturally comprise at least one hydroxyl group on a surface thereof but which have been modified using conventional surface treatment techniques such that at least one hydroxyl group is present on a surface of the bioactive carrier. In one example, said hydroxyl group is an available hydroxyl group i.e. it is not prevented from interacting and/or reacting with a compound of the present disclosure. Suitable as bioactive carriers naturally containing hydroxyl groups on a surface thereof for implementing embodiments of the invention specifically include metal oxides such as titanium oxides and non-metal oxides such ceramics. Also suitable as bioactive carriers for implementing embodiments of the invention include bioactive carriers comprising at least one naturally occurring carboxylate group (—COOH) or amine group (—NH₂) on at least one of a surface thereof and bioactive carriers which do not naturally comprise at least one carboxylate group (—COOH) or amine group (—NH₂) onto a surface thereof but which have been modified using conventional surface treatment techniques such that at least one carboxylate group (—COOH) or amine group (—NH₂) is present on a surface of the bioactive carrier.

[0518] In one example, said bioactive carrier includes a biomaterial. Suitable biomaterials for implementing certain embodiments of the present disclosure may be derived from nature or synthesized in the laboratory using a variety of chemical approaches utilizing metallic components, polymers, ceramics or composite materials. They are often used and/or adapted for a medical application, and thus comprise whole or part of a living structure or biomedical device. Suitable biomaterials for implementing certain embodiments of the present disclosure are commonly used in joint replacements, bone plates, bone cement, artificial ligaments and tendons, dental implants for tooth fixation, blood vessel prostheses, heart valves, skin repair devices (artificial tissue), cochlear replacements, contact lenses, breast implants, drug delivery mechanisms, sustainable materials, vascular grafts, stents, nerve conduits. Particularly suitable biomaterials for implementing certain embodiments of the present disclosure such as metals and alloys (pages 94-95), ceramics (pages 95-97), polymeric biomaterials (pages 97-98) and biocomposite materials (pages 98-99) are described in Nitesh et al., International Journal of Emerging Technology and Advanced Engineering, ISSN 2250-2459, Volume 2, Issue 4, 2012, which is herein incorporated by reference in its entirety.

[0519] In one particular example, said bioactive carrier is a biomaterial.

[0520] In certain embodiments, particularly suitable bioactive carriers are selected from the group consisting of bioinert biomaterials, bioactive biomaterials and bioresorbable biomaterials.

[0521] The nature of the biomaterial is an important parameter. Particularly good results have been obtained using bioactive carriers composed mostly with the main material component of the tissue to be regenerated and/or repaired. This generally allows for a better integration of the bioactive carrier, a better resorption from the surrounding cells already present and therefore a better regeneration or repair of the targeted tissue to be achieved. For example, it was discovered that particularly good results may be obtained when a solid ceramic component (granulated ceramic powder or ceramic scaffolds) or a gel ceramic component is used in combination of a GFR-binding peptide of the present disclosure to regenerate bone and protect from osteoporosis. For example, it was also discovered that particularly good results may be obtained when collagen, in particular collagen types I, II, III and XI, is used in combination of a GFR-binding peptide of the present disclosure to regenerate cartilage. For example, it was also discovered that particularly good results may be obtained when collagen, in particular collagen types I and III, or a biodegradable hydrogel is used in combination of a GFR-binding peptide of the present disclosure to regenerate muscle, skin, tendons and ligaments. For example, it was also discovered that particularly good results may be obtained when a collagen or a biodegradable hydrogel is used in combination of a GFR-binding peptide of the present disclosure to regenerate tissues and/or functions of vascular, neuron, eye retina, renal, wound healing, hair, fertility and reproduction, lung, and adipose tissues.

[0522] Bioinert biomaterials: As used herein, unless indicated otherwise or contradictory in context, the term “bioinert biomaterials” refers to any material that once placed in the human body has minimal interaction with its surrounding tissue. Examples of these are stainless steel, titanium, alumina, partially stabilised zirconia, and ultra-high molecular weight polyethylene. Generally a fibrous capsule might form around bioinert implants hence its biofunctionality relies on tissue integration through the implant.

[0523] Bioactive biomaterial: As used herein, unless indicated otherwise or contradictory in context, the term “bioactive biomaterial” refers to a material which, upon being placed within the human body, interacts with the surrounding bone and in some cases, even soft tissue. This occurs through a time-dependent kinetic modification of the surface, triggered by their implantation within the living bone. An ion-exchange reaction between the bioactive implant and surrounding body fluids, results in the formation of a biologically active carbonate apatite (CHAp) layer on the implant that is chemically and crystallographically equivalent to the mineral phase in bone. Examples of these materials are synthetic hydroxyapatite [Ca₁₀(PO₄)₆(OH)₂], glass ceramic A-W and Bioglass®.

[0524] Bioresorbable Biomaterials: As used herein, unless indicated otherwise or contradictory in context, the term “bioresorbable biomaterials” refers to a material which, upon placement within the human body, starts to dissolve (resorbed) and slowly replaced by advancing tissue (such as bone). Examples of bioresorbable materials include, but are not limited to, tricalcium phosphate [Ca₃(PO₄)₂], polylactic-polyglycolic acid copolymers, calcium oxide, calcium carbonate and gypsum.

[0525] Therefore, no particular limitation should be ascribed to the substance, material or molecule suitable as being bioactive carriers for implementing embodiments of the present invention insofar as said substance, material or molecule is (a) biocompatible as defined herein and (b) combinable or associable with a cyclic GFR-binding compound as defined herein. In one preferred example, said bioactive carrier has a stiffness of at least 5 kPa, more preferably at least 35 kPa and preferably not more than 3 or 5 GPa as measured using conventional Dynamic Mechanical Analysis such as described in details in Gong J P et al., Double-network hydrogels with extremely high mechanical strength, Adv Mater 2003, 15(14), 1155e8, which is incorporated herein by reference.

[0526] In one particular example, a biomaterial as defined herein for use in neuron-related applications has a stiffness comprised between about 0.01 kPa and about 3 kPa, preferably between about 0.01 kPa and about 1 kPa. In one particular example, a biomaterial as defined herein for use in muscle, cartilage and tendon/ligament-related applications has a stiffness comprised between about 3 kPa and about 200 kPa, preferably between about 10 kPa and about 30 kPa. In one particular example, a biomaterial as defined herein for use in bone-related applications has a stiffness comprised between about 30 kPa and about 3 GPa, preferably between about 70 kPa and about 200 kPa for instance in applications such as the treatment or prevention of osteoporosis and bone tissue regeneration. In one particular example, a biomaterial as defined herein for use in hair-related applications has a stiffness comprised between about 0.01 kPa and about 200 kPa, preferably between about 3 kPa and about 70 kPa. In one particular example, a biomaterial as defined herein for use in endothelization-related applications has a stiffness comprised between about 500 kPa and about 2.5 GPa. In one particular example, a biomaterial as defined herein for use in angiogenesis-related applications has a stiffness comprised between about 0.01 kPa and about 100 kPa. In one particular example, a biomaterial as defined herein for use in wound healing and skin-related applications has a stiffness comprised between about 0.01 kPa and about 70 kPa.

[0527] Available hydroxyl groups: As used herein, unless indicated otherwise or contradictory in context, the term “free hydroxyl” or “available hydroxyl” means an hydroxyl group, which may be —OH or a radical (—O.) or an anion (—O⁻) fully or partially ionised, which is able to/free to act as a nucleophile in a reaction with an electrophile such as compound (A) or compound (B) defined below.

[0528] Available hydroxyl-containing surface: As used herein, unless indicated otherwise or contradictory in context, the term “available hydroxyl-containing surface” or “free hydroxyl-containing surface” means a surface containing at least one free or available hydroxyl group as defined herein.

[0529] Ceramics: As used herein, unless indicated otherwise or contradictory in context, the term “ceramic” refers to an inorganic material with a high melting point, above 1000° C. Most typically, materials referred to as “ceramics” are obtained by a process in which raw material solid particles are heated in order to sinter them. Materials referred to as “ceramics” may broadly be split into two groups, these being “oxide ceramics” and “non-oxide ceramics”. “Oxide ceramics” include, but are not limited to, alkaline earth oxides such as MgO and BaO, Al₂O₃ and aluminates, TiO₂ and titanates, ZrO₂ and zirconates, silicates such as clays and clay-derived materials. Since the term “ceramics” may encompass crystalline, partially amorphous and fully amorphous materials, the term “oxide ceramics” may also be interpreted as covering fully amorphous silicate glasses. “Non-oxide ceramics” include, but are not limited to, carbides and nitrides, and also borides and silicides, for example silicon carbide and silicon nitride, and also metal carbides and nitrides. In one particular example, solid ceramics e.g. in granulated powder or as a scaffold, is used as a bioactive carrier in the meaning of the present disclosure in bone-related applications. In one particular example, gel ceramics is used as a bioactive carrier in the meaning of the present disclosure in bone-related applications.

[0530] Metal oxides: As used herein, unless indicated otherwise or contradictory in context, the term “metal oxide” means a chemical compound that contains at least one oxygen atom and one other element in its chemical formula. Metal oxides typically contain an anion of oxygen in the oxidation state of −2. They can be obtained by hydrolysis or air/oxygen oxidation. Examples of such metal oxides are titanium oxides (e.g. TiO, Ti₂O₃, TiO₂), silicon oxide (SiO₂), aluminum oxide (Al₂O₃), iron (II, III) oxides such as Fe₂O₃, and zinc oxide (ZnO).

[0531] Biopolymer: As used herein, unless indicated otherwise or contradictory in context, the term “biopolymer” refers to a polymer produced by living organisms and includes, but is not limited to, polypeptides and proteins (such as collagen and fibrin), polysaccharides (such as cellulose, starch, chitin and chitosan), nucleic acids (such as DNA and RNA), and hydrides thereof.

[0532] Hydrogel: As used herein, unless indicated otherwise or contradictory in context, the term “hydrogel” refers to “Hydrogel” refers to a class of polymeric materials which are swollen in an aqueous medium, but which do not dissolve in water. Hydrogels are highly absorbent (they can contain over 99% water) natural or synthetic polymers. Hydrogels also possess a degree of flexibility very similar to natural tissue, due to their significant water content. U.S. Pat. No. 6,475,516, for example, provides hydrogels being covalently bound to the surface of an in-dwelling medical device such as an implant, which may be functionalized with a GFR-binding compound of the present disclosure using, for instance, a process as described herein. In one particular example, biodegradable hydrogels are used as bioactive carriers in the meaning of the present disclosure.

[0533] Collagen: As used herein, unless indicated otherwise or contradictory in context, the term “collagen” refers to the main structural protein of the various connective tissues in animals which is mostly found in fibrous tissues such as tendons, ligaments and skin, and is also abundant in corneas, cartilage, bones, blood vessels, the gut, and intervertebral discs. Collagen is typically composed of a triple helix and generally contains high hydroxyproline content. The most common motifs in its amino acid sequence glycine-proline-X and glycine-X-hydroxyproline, where X is any amino acid other than glycine, proline or hydroxyproline. 28 types of collagen have been identified and described in the literature, which are all presently contemplated to be suitable for implementing embodiments of the invention. The five most common types are: Collagen I which may be found in skin, tendon, vascular ligature, organs, bone (main component of the organic part of bone); Collagen II which may be found in cartilage (main component of cartilage); Collagen III which may be found in reticulate (main component of reticular fibers); Collagen IV which may be found in the basal lamina, the epithelium-secreted layer of the basement membrane; Collagen V which may be found on cell surfaces, hair and placenta. For example, in certain embodiments, suitable collagens for implementing embodiments of the present invention particularly include collagen type-1 and type-IV. In one particular example, collagen, in particular collagen types I, II, III and XI, is used as a bioactive carrier in the meaning of the present disclosure in cartilage-related applications. In one particular example, collagen, in particular collagen types I and III, is used as a bioactive carrier in the meaning of the present disclosure in muscle-related applications, skin-related applications, and T/L-related applications. In one particular example, any type of collagen is used as a bioactive carrier in the meaning of the present disclosure in vascular, neuron, eye retina, renal, wound healing, hair, fertility and reproduction, lung, adipose-related applications.

[0534] In certain embodiments, said association, combination, linkage or connection between said cyclic GFR-binding compound and a bioactive carrier may occur via a bioactive carrier-affinity-containing group as defined herein.

### IV. Bioactive Carrier-Affinity-Containing Group (BCAC Group)

[0535] In one aspect, the present disclosure provides a cyclic GFR-binding compound as already defined herein modified or functionalised with at least one bioactive carrier-affinity-containing group. Said at least one bioactive carrier-affinity-containing group provides said cyclic GFR-binding compound with the ability to, covalently or non-covalently, interact with, or be connected to, a bioactive carrier as defined herein (in particular, a biomaterial as defined herein).

[0536] In such embodiments where affinity is required via covalent interaction or binding, said bioactive carrier-affinity-containing group may be a thiol (SH)-containing group or a cysteine-containing group, in particular, a thiol (SH)-containing peptide or a cysteine-containing peptide. In such embodiments where affinity is required via covalent interaction or binding, said bioactive carrier-affinity-containing group may particularly be a cysteine.

[0537] In such embodiments where affinity is required via non-covalent interaction or binding, said bioactive carrier-affinity-containing group may comprise (or be) a peptide group such as any one of the peptide groups disclosed in US patent application No. 2008/0268015 A1, which is hereby incorporated by reference in its entirety. In particular, peptides containing amino acid sequences rich in large aromatic amino acid residues (aromatic amino acid-containing peptides or peptidomimetics) that include one or more of Phe, Trp, Tyr such as sequences no: 1 to 45 described in US 2008/0268015 A1 are suitable as a biomaterial-affinity-containing fragment for implementing embodiments of the present invention. Said fragment may also be a peptide fragment such as any one of the peptide fragments disclosed in U.S. Pat. No. 6,818,620 B2, which is hereby incorporated by reference in its entirety. In particular, peptides of sequences no: 1 to 7 described in U.S. Pat. No. 6,818,620 B2 are suitable as a biomaterial-affinity-containing fragment for implementing embodiments of the present invention.

[0538] In one particular example, said bioactive carrier-affinity-containing group is a bioactive carrier high-affinity-containing group such as a biomaterial high-affinity-containing group.

[0539] In certain embodiments, said bioactive carrier-affinity-containing group has some affinity (preferably high affinity) with a given bioactive carrier (in particular, a biomaterial) such as collagen, apatite, titanium or any of those listed in e.g. US patent application No. 2008/0268015 A1, which is incorporated herein by reference. For instance, a group having some affinity with a biomaterial is any group capable to non-covalently interact/bind to a biomaterial with an affinity/specificity selected from at least 10%, at least 20%, at least 30%, at least 40%, at least 50%, at least 60%, at least 70%, at least 80%, at least 90%, at least 100%, at least 200%, at least 300%, at least 400%, at least 500%, or a higher percentage, with respect to an affinity where said group binds to an appropriate control such as, for example, a different material or surface, or a protein typically used for such comparisons such as bovine serum albumin. In one example, a biomaterial-affinity-containing group has a binding specificity that is characterized by a relative binding affinity as measured by an EC50 of 10 □M or less, and in certain embodiments, less than 1 □M. In certain embodiments, a relative affinity comprised between 1 pM and 100 □M, between 1 pM and 10 □M, or between 1 pM and 1 □M is particularly suitable. The EC50 is determined using any number of methods known in the art. In this case, the EC50 represents the concentration of fragment producing 50% of the maximal binding observed for that fragment in the assay.

[0540] In one particular example, said bioactive carrier-affinity-containing group is selected from the group consisting of GTPGP, which may preferably non-covalently interact with a bioactive carrier such as an apatite, and WWFWG, which may preferably non-covalently interact with a bioactive carrier such as a collagen.

### V. Modified Cyclic GFR-Binding Compound

[0541] Thus, in one aspect, the present disclosure provides a modified cyclic GFR-binding compound comprising a cyclic GFR-binding compound as defined in the present disclosure and a bioactive carrier-affinity-containing group.

[0542] For example, in certain embodiments, the present disclosure provides a modified cyclic GFR-binding compound comprising a cyclic GFR-binding compound as defined in the present disclosure and a bioactive carrier-affinity-containing group; wherein said bioactive carrier-affinity-containing group is selected from the group consisting of a thiol-containing group (in particular, a thiol-containing peptide), a cysteine-containing group (in particular, a cysteine-containing peptide and more particularly, a cysteine), and an aromatic amino acid-containing peptide or peptidomimetic.

[0543] For example, in certain embodiments, the present disclosure provides a modified cyclic GFR-binding compound comprising a cyclic GFR-binding compound and a bioactive carrier-affinity-containing group; wherein said cyclic GFR-binding compound is a cyclic peptide, a variant or analog thereof, or a cyclic peptidomimetic as defined herein, with (comprising, or exclusively consisting of, or constituted of) between 10-35 (in particular between 15-35, more particularly between 10-30, and even more particularly between 15-30) amino acids; comprising a peptide with four amino acids (PEP1) selected from the group consisting of SAIS, SSLS, NAIS, SATS, SPIS, EPIS, SPIN, KPLS, EPLP, EPLT, SNIT, RSVK and RPVQ; wherein said bioactive carrier-affinity-containing group is selected from the group consisting of a thiol-containing group (in particular, a thiol-containing peptide), a cysteine-containing group (in particular, a cysteine-containing peptide and more particularly, a cysteine), and an aromatic amino acid-containing peptide or peptidomimetic.

[0544] For example, in certain embodiments, the present disclosure provides a modified cyclic GFR-binding compound comprising a cyclic GFR-binding compound and a bioactive carrier-affinity-containing group; wherein said cyclic GFR-binding compound is a cyclic peptide, a variant or analog thereof, or a cyclic peptidomimetic as defined herein, with (comprising, or exclusively consisting of, or constituted of) between 10-35 (in particular between 15-35, more particularly between 10-30, and even more particularly between 15-30) amino acids; comprising a peptide with height amino acids of general formula (PEP12): PEP1-AA¹⁷-PEP11; wherein PEP1 is a peptide with four amino acids selected from the group consisting of SAIS, SSLS, NAIS, SATS, SPIS, EPIS, SPIN, KPLS, EPLP, EPLT, SNIT, RSVK and RPVQ; wherein PEP11 is a peptide with 3 amino acids of formula AA¹⁸-AA¹⁹-AA²⁰; wherein AA¹⁷ is selected from the group consisting of G, A, V, L, I, P, F, M, W, T and S (in particular is selected from the group consisting of M, I, L, V and T); wherein AA¹⁸ is selected from the group consisting of L, V, Q, A and R; wherein AA¹⁹ is selected from the group consisting of F, W, H and Y (in particular is an aromatic, polar amino acid such as Y); wherein AA²⁰ is selected from the group consisting of L, F, Y, K, I, V and M; wherein said bioactive carrier-affinity-containing group is selected from the group consisting of a thiol-containing group (in particular, a thiol-containing peptide), a cysteine-containing group (in particular, a cysteine-containing peptide and more particularly, a cysteine), and an aromatic amino acid-containing peptide or peptidomimetic.

[0545] For example, in certain embodiments, the present disclosure provides a modified cyclic GFR-binding compound comprising a cyclic GFR-binding compound and a bioactive carrier-affinity-containing group, wherein said cyclic GFR-binding compound is a cyclic peptide, a variant or analog thereof, or a cyclic peptidomimetic as defined herein, with between 10-60 (in particular between 15-60, more particularly between 10-55, and even more particularly between 15-55) amino acids or with between 10-35 (in particular between 15-35, more particularly between 10-30, and even more particularly between 15-30) amino acids, comprising a peptide, a variant or analog thereof, or a peptidomimetic having the following general formula (I):

PEP(A)-LINKER (I)

[0546] wherein one end of LINKER interacts covalently with one end of PEP(A); wherein PEP(A) comprises PEP1 or PEP12; wherein LINKER is a linear or branched organic divalent radical, moiety or compound having a molecular weight (Mw) comprised between 450 and 4,500 Daltons, in particular comprised between about 600 and about 4,500 Da, more particularly between about 600 and about 4,000 Da, and even more particularly between about 600 and about 3,500 Da; wherein said bioactive carrier-affinity-containing group is selected from the group consisting of a thiol-containing group (in particular, a thiol-containing peptide), a cysteine-containing group (in particular, a cysteine-containing peptide and more particularly, a cysteine), and an aromatic amino acid-containing peptide or peptidomimetic.

[0547] For example, in certain embodiments, the present disclosure provides a modified cyclic GFR-binding compound comprising a cyclic GFR-binding compound and a bioactive carrier-affinity-containing group; wherein said cyclic GFR-binding compound is a cyclic peptide, a variant or analog thereof, or a cyclic peptidomimetic as defined herein, with between 10-60 (in particular between 15-60, more particularly between 10-55, and even more particularly between 15-55) amino acids or with between 10-35 (in particular between 15-35, more particularly between 10-30, and even more particularly between 15-30) amino acids, comprising a peptide, a variant or analog thereof, or a peptidomimetic having the following general formula (II):

PEP(C)-PEP12-LINKER (II)

[0548] wherein LINKER is a linear or branched organic divalent radical, moiety or compound having a molecular weight (Mw) comprised between 450 and 4,500 Daltons, in particular comprised between about 600 and about 4,500 Da, more particularly between about 600 and about 4,000 Da, and even more particularly between about 600 and about 3,500 Da; wherein PEP12 is a peptide with 8 amino acids of formula PEP1-AA¹⁷-PEP11 as defined herein; wherein PEP2 is a peptide with five amino acids as already defined herein; wherein one end of PEP(C) interacts covalently with PEP12 via one end of PEP1; wherein one end of LINKER interacts covalently with one end of PEP12 via one end of PEP11; wherein PEP(C) is a peptide with at least 5 amino acids, in particular a peptide with between 5 and 12 amino acids; wherein said bioactive carrier-affinity-containing group is selected from the group consisting of a thiol-containing group (in particular, a thiol-containing peptide), a cysteine-containing group (in particular, a cysteine-containing peptide and more particularly, a cysteine), and an aromatic amino acid-containing peptide or peptidomimetic.

[0549] For example, in certain embodiments, the present disclosure provides a modified cyclic GFR-binding compound comprising a cyclic GFR-binding compound and a bioactive carrier-affinity-containing group, wherein said cyclic GFR-binding compound is a cyclic peptide, a variant or analog thereof, or a cyclic peptidomimetic as defined herein, with between 10-60 (in particular between 15-60, more particularly between 10-55, and even more particularly between 15-55) amino acids or with between 10-35 (in particular between 15-35, more particularly between 10-30, and even more particularly between 15-30) amino acids, comprising a peptide, a variant or analog thereof, or a peptidomimetic having the following general formula (III):

PEP7-PEP3-PEP12-LINKER (III)

[0550] wherein LINKER is a linear or branched organic divalent radical, moiety or compound having a molecular weight (Mw) comprised between 450 and 4,500 Daltons, in particular comprised between about 600 and about 4,500 Da, more particularly between about 600 and about 4,000 Da, and even more particularly between about 600 and about 3,500 Da; wherein PEP12 is a peptide with 8 amino acids of formula PEP1-AA¹⁷-PEP11 as defined herein; wherein PEP3 is a peptide with five amino acids as already defined herein; wherein PEP7 an amino acid or a peptide with between two and seven amino acids as already defined herein; wherein one end of LINKER interacts covalently with one end of PEP12 via AA²⁰; wherein one end of PEP3 interacts covalently with another end of PEP12 via AA¹²; wherein another end of PEP3 interacts covalently with one end of PEP7 via AA⁸; wherein said bioactive carrier-affinity-containing group is selected from the group consisting of a thiol-containing group (in particular, a thiol-containing peptide), a cysteine-containing group (in particular, a cysteine-containing peptide and more particularly, a cysteine), and an aromatic amino acid-containing peptide or peptidomimetic.

[0551] For example, in certain embodiments, the present disclosure provides a modified cyclic GFR-binding compound comprising a cyclic GFR-binding compound and a bioactive carrier-affinity-containing group, wherein said cyclic GFR-binding compound is a cyclic peptide, a variant or analog thereof, or a cyclic peptidomimetic as defined herein, with between 10-60 (in particular between 15-60, more particularly between 10-55, and even more particularly between 15-55) amino acids or with between 10-35 (in particular between 15-35, more particularly between 10-30, and even more particularly between 15-30) amino acids, comprising a peptide, a variant or analog thereof, or a peptidomimetic having the following general formula (IV):

AA¹-AA²-AA³-AA⁴-AA⁵-AA⁶-AA⁷-AA⁸-AA⁹-AA¹⁰-AA¹¹-AA¹²-AA¹³-AA¹⁴-AA¹⁵-AA¹⁶-AA¹⁷-AA¹⁸-AA¹⁹-AA²⁰-LINKER (IV)

[0552] wherein LINKER is a linear or branched organic divalent radical, moiety or compound having a molecular weight (Mw) comprised between 450 and 4,500 Daltons, in particular comprised between about 600 and about 4,500 Da, more particularly between about 600 and about 4,000 Da, and even more particularly between about 600 and about 3,500 Da; wherein AA¹-AA²-AA³-AA⁴-AA⁵-AA⁶-AA⁷ is PEP7 as defined herein; wherein AA¹³-AA¹⁴-AA¹⁵-AA¹⁶-AA¹⁷-AA¹⁸-AA¹⁹-AA²⁰ is PEP12 as defined herein; wherein AA⁸-AA⁹-AA¹⁰ is PEP3 as defined herein; wherein AA¹¹ and AA¹² are as defined herein; wherein one end of LINKER interacts covalently with AA²⁰; wherein AA¹ may be an N-terminal amino acid or a C-terminal amino acid; wherein AA²⁰ may be an N-terminal amino acid or a C-terminal amino acid; wherein said bioactive carrier-affinity-containing group is selected from the group consisting of a thiol-containing group (in particular, a thiol-containing peptide), a cysteine-containing group (in particular, a cysteine-containing peptide and more particularly, a cysteine), and an aromatic amino acid-containing peptide or peptidomimetic.

[0553] In one particular example, said bioactive carrier-affinity-containing group is comprised within said cyclic GFR-binding compound e.g. is comprised in at least one LINKER, or is at least one LINKER. For example, in certain embodiments, said modified cyclic GFR-binding compound may have any one of the following general schematic formulae:

[chemical structure]

[chemical structure]

### VI. Functionalised Bioactive Carriers

[0554] In one aspect, the present disclosure provides a functionalised bioactive carrier, which may be used for inducing, in-vitro, ex-vivo or in-vivo, tissue regeneration, comprising at least one cyclic GFR-binding compound (in particular, at least one modified cyclic GFR-binding compound) as defined in the present disclosure. In one example, said (modified) cyclic GFR-binding compound and bioactive carrier are both active principles/ingredients. In certain embodiments, said functionalised bioactive carrier is a modified, functionalised, coated or grafted biomaterial as defined herein, in particular, a modified, functionalised, coated or grafted tissue regeneration compatible-biomaterial.

[0555] In one example, said functionalised bioactive carrier comprises one (modified) cyclic GFR-binding compound. In one example, said functionalised bioactive carrier comprises two or more distinct (modified) cyclic GFR-binding compounds. In one example, said functionalised bioactive carrier comprises three or more distinct (modified) cyclic GFR-binding compounds. In one example, said functionalised bioactive carrier comprises four or more distinct (modified) cyclic GFR-binding compounds.

[0556] Active or Bioactive Principles or Ingredients:

[0557] In the present description and unless otherwise indicated or contradictory in context, the term “(bio)active principle” or “(bio)active ingredient” generally refers to a molecule, compound or substance which is responsible for providing the desired biological effect. Without said active ingredient, the formulation or composition containing it, would not provide the desired biological effect. For example, in certain embodiments, formulation excipients are not considered as active ingredients in the pharmaceutical composition as defined herein.

[0558] In one example, said functionalised bioactive carrier is formed using a method comprising, or exclusively consisting of, contacting a bioactive carrier as defined herein and a (modified) cyclic GFR-binding compound under reacting conditions thereby functionalizing at least one part (or at least one part of a surface) of said bioactive carrier and thus forming a functional association, interaction or bond between said bioactive carrier and said (modified) cyclic GFR-binding compound.

[0559] In the present description and unless otherwise indicated or contradictory in context, the terms “functionally associated”, “functionally combined”, “functionalized”, “immobilized”, “deposited”, “coated”, or “grafted” all refer to the action of associating or functionalising at least one part of a bioactive carrier with a (modified) cyclic GFR-binding compound so that the desired biological, therapeutic and/or cosmetic effect e.g. inducing tissue formation, is obtained. The association or combination may be covalent and form, between said (modified) cyclic GFR-binding compound and said bioactive carrier, a covalent interaction as already defined herein, or, the association or combination may be non-covalent and form, between said (modified) cyclic GFR-binding compound and said bioactive carrier, a non-covalent interaction as already defined herein.

[0560] For example, in certain embodiments, a (modified) cyclic GFR-binding compound interacts covalently (makes at least one functional covalent interaction) with said bioactive carrier.

[0561] In one aspect, the present disclosure thus provides a functionalised bioactive carrier comprising a (modified) cyclic GFR-binding compound, wherein said (modified) cyclic GFR-binding compound (before any modifications) is a peptide, or a variant or analog thereof, having growth factor receptor-binding capability or capabilities, with (exclusively consisting of, or constituted of) between 10-60 amino acids, in particular between 10-55 amino acids, more particularly between 15-60 amino acids, and even more particularly between 15-55 amino acids, or between 10-35 amino acids, in particular between 15-35 amino acids, more particularly between 10-30 amino acids, and even more particularly between 15-30 amino acids.

[0562] In one aspect, the present disclosure thus provides a functionalised bioactive carrier comprising a (modified) cyclic GFR-binding compound, wherein said (modified) cyclic GFR-binding compound (before any modifications) is a cyclic peptidomimetic as defined herein, having growth factor receptor-binding capability or capabilities, comprising (consecutively or non consecutively) between 10-60 amino acids, in particular between 10-55 amino acids, more particularly between 15-60 amino acids, and even more particularly between 15-55 amino acids, or between 10-35 amino acids, in particular between 15-35 amino acids, more particularly between 10-30 amino acids, and even more particularly between 15-30 amino acids; wherein said cyclic GFR-binding compound has a molecular weight comprised between 1,000 and 5,000 Daltons (in particular, between 1,000 and 4,000 Da).

[0563] In one aspect, the present disclosure thus provides a functionalised bioactive carrier comprising a (modified) cyclic GFR-binding compound, wherein said (modified) cyclic GFR-binding compound (before any modifications) is a cyclic peptidomimetic as defined herein, having growth factor receptor-binding capability or capabilities, comprising (consecutively or non consecutively) between 10-60 amino acids, in particular between 10-55 amino acids, more particularly between 15-60 amino acids, and even more particularly between 15-55 amino acids, or between 10-35 amino acids, in particular between 15-35 amino acids, more particularly between 10-30 amino acids, and even more particularly between 15-30 amino acids; and containing at least one peptide portion or fragment with between 5-20 amino acids (in particular containing one peptide portion or fragment with between 5-20 amino acids); wherein said cyclic GFR-binding compound has a molecular weight comprised between 1,000 and 5,000 Daltons (in particular, between 1,000 and 4,000 Da).

[0564] In one aspect, the present disclosure thus provides a functionalised bioactive carrier comprising a (modified) cyclic GFR-binding compound, wherein said (modified) cyclic GFR-binding compound (before any modifications) is a cyclic peptide, a variant or analog thereof, or a cyclic peptidomimetic as defined herein, having growth factor receptor-binding capability or capabilities, having a molecular weight of less than 5,000 Da, in particular of between 1,000 and 5,000 Da, more particularly of between 1,000 and 4,000 Da.

[0565] In one aspect, the present disclosure thus provides a functionalised bioactive carrier comprising a (modified) cyclic GFR-binding compound, wherein said (modified) cyclic GFR-binding compound (before any modifications) is a cyclic peptide, a variant or analog thereof, or a cyclic peptidomimetic as defined herein, having growth factor receptor-binding capability or capabilities, with between 10-60 (in particular between 15-60, more particularly between 10-55, and even more particularly between 15-55) amino acids or with between 10-35 (in particular between 15-35, more particularly between 10-30, and even more particularly between 15-30) amino acids, comprising a peptide with four amino acids (PEP1).

[0566] In one aspect, the present disclosure thus provides a functionalised bioactive carrier comprising a (modified) cyclic GFR-binding compound, wherein said (modified) cyclic GFR-binding compound (before any modifications) is a cyclic peptide, a variant or analog thereof, or a cyclic peptidomimetic as defined herein, with between 10-60 (in particular between 15-60, more particularly between 10-55, and even more particularly between 15-55) amino acids or with between 10-35 (in particular between 15-35, more particularly between 10-30, and even more particularly between 15-30) amino acids, comprising a peptide with eight amino acids (PEP12).

[0567] In one aspect, the present disclosure thus provides a functionalised bioactive carrier comprising a (modified) cyclic GFR-binding compound, wherein said (modified) cyclic GFR-binding compound (before any modifications) is a cyclic peptide, a variant or analog thereof, or a cyclic peptidomimetic as defined herein, with between 10-60 (in particular between 15-60, more particularly between 10-55, and even more particularly between 15-55) amino acids or with between 10-35 (in particular between 15-35, more particularly between 10-30, and even more particularly between 15-30) amino acids, comprising a peptide with four amino acids (PEP1); wherein said cyclic GFR-binding compound further comprises a peptide with three amino acids (PEP3).

[0568] In one aspect, the present disclosure thus provides a functionalised bioactive carrier comprising a (modified) cyclic GFR-binding compound, wherein said (modified) cyclic GFR-binding compound (before any modifications) is a cyclic peptide, a variant or analog thereof, or a cyclic peptidomimetic as defined herein, with between 10-60 (in particular between 15-60, more particularly between 10-55, and even more particularly between 15-55) amino acids or with between 10-35 (in particular between 15-35, more particularly between 10-30, and even more particularly between 15-30) amino acids, comprising a peptide with eight amino acids (PEP12); wherein said cyclic GFR-binding compound further comprises a peptide with three amino acids (PEP3).

[0569] In one aspect, the present disclosure thus provides a functionalised bioactive carrier comprising a (modified) cyclic GFR-binding compound, wherein said (modified) cyclic GFR-binding compound (before any modifications) is a cyclic peptide, a variant or analog thereof, or a cyclic peptidomimetic as defined herein, with between 10-60 (in particular between 15-60, more particularly between 10-55, and even more particularly between 15-55) amino acids or with between 10-35 (in particular between 15-35, more particularly between 10-30, and even more particularly between 15-30) amino acids, comprising a peptide with four amino acids (PEP1); wherein said cyclic GFR-binding compound further comprises a peptide with five amino acids (PEP5).

[0570] In one aspect, the present disclosure thus provides a functionalised bioactive carrier comprising a (modified) cyclic GFR-binding compound, wherein said (modified) cyclic GFR-binding compound (before any modifications) is a cyclic peptide, a variant or analog thereof, or a cyclic peptidomimetic as defined herein, with between 10-60 (in particular between 15-60, more particularly between 10-55, and even more particularly between 15-55) amino acids or with between 10-35 (in particular between 15-35, more particularly between 10-30, and even more particularly between 15-30) amino acids, comprising a peptide with eight amino acids (PEP12); wherein said cyclic GFR-binding compound further comprises a peptide with five amino acids (PEP5).

[0571] In one aspect, the present disclosure thus provides a functionalised bioactive carrier comprising a (modified) cyclic GFR-binding compound, wherein said (modified) cyclic GFR-binding compound (before any modifications) is a cyclic peptide, a variant or analog thereof, or a cyclic peptidomimetic as defined herein, with between 10-60 (in particular between 15-60, more particularly between 10-55, and even more particularly between 15-55) amino acids or with between 10-35 (in particular between 15-35, more particularly between 10-30, and even more particularly between 15-30) amino acids, comprising a peptide with four amino acids (PEP1); wherein said cyclic GFR-binding compound further comprises a peptide with between six and twelve amino acids (PEP9).

[0572] In one aspect, the present disclosure thus provides a functionalised bioactive carrier comprising a (modified) cyclic GFR-binding compound, wherein said (modified) cyclic GFR-binding compound (before any modifications) is a cyclic peptide, a variant or analog thereof, or a cyclic peptidomimetic as defined herein, with between 10-60 (in particular between 15-60, more particularly between 10-55, and even more particularly between 15-55) amino acids or with between 10-35 (in particular between 15-35, more particularly between 10-30, and even more particularly between 15-30) amino acids, comprising a peptide with eight amino acids (PEP12); wherein said cyclic GFR-binding compound further comprises a peptide with between six and twelve amino acids (PEP9).

[0573] In one aspect, the present disclosure thus provides a functionalised bioactive carrier comprising a (modified) cyclic GFR-binding compound, wherein said (modified) cyclic GFR-binding compound (before any modifications) is a cyclic peptide, a variant or analog thereof, or a cyclic peptidomimetic as defined herein, with between 10-60 (in particular between 15-60, more particularly between 10-55, and even more particularly between 15-55) amino acids or with between 10-35 (in particular between 15-35, more particularly between 10-30, and even more particularly between 15-30) amino acids, comprising a peptide with four amino acids (PEP1); wherein said cyclic GFR-binding compound further comprises a peptide with three amino acids (PEP3), and an amino acid or a peptide with between two and seven amino acids (PEP7).

[0574] In one aspect, the present disclosure thus provides a functionalised bioactive carrier comprising a (modified) cyclic GFR-binding compound, wherein said (modified) cyclic GFR-binding compound (before any modifications) is a cyclic peptide, a variant or analog thereof, or a cyclic peptidomimetic as defined herein, with between 10-60 (in particular between 15-60, more particularly between 10-55, and even more particularly between 15-55) amino acids or with between 10-35 (in particular between 15-35, more particularly between 10-30, and even more particularly between 15-30) amino acids, comprising a peptide with four amino acids (PEP12); wherein said cyclic GFR-binding compound further comprises a peptide with three amino acids (PEP3), and an amino acid or a peptide with between two and seven amino acids (PEP7).

[0575] In one aspect, the present disclosure thus provides a functionalised bioactive carrier comprising a (modified) cyclic GFR-binding compound, wherein said (modified) cyclic GFR-binding compound (before any modifications) is a cyclic peptide, a variant or analog thereof, or a cyclic peptidomimetic as defined herein, with between 10-60 (in particular between 15-60, more particularly between 10-55, and even more particularly between 15-55) amino acids or with between 10-35 (in particular between 15-35, more particularly between 10-30, and even more particularly between 15-30) amino acids, comprising a peptide with four amino acids (PEP1); wherein said cyclic GFR-binding compound further comprises a peptide with five amino acids (PEP5), and an amino acid or a peptide with between two and seven amino acids (PEP7).

[0576] In one aspect, the present disclosure thus provides a functionalised bioactive carrier comprising a (modified) cyclic GFR-binding compound, wherein said (modified) cyclic GFR-binding compound (before any modifications) is a cyclic peptide, a variant or analog thereof, or a cyclic peptidomimetic as defined herein, with between 10-60 (in particular between 15-60, more particularly between 10-55, and even more particularly between 15-55) amino acids or with between 10-35 (in particular between 15-35, more particularly between 10-30, and even more particularly between 15-30) amino acids, comprising a peptide with four amino acids (PEP12); wherein said cyclic GFR-binding compound further comprises a peptide with five amino acids (PEP5), and an amino acid or a peptide with between two and seven amino acids (PEP7).

[0577] In one aspect, the present disclosure thus provides a functionalised bioactive carrier comprising a (modified) cyclic GFR-binding compound, wherein said (modified) cyclic GFR-binding compound (before any modifications) is a cyclic peptide, a variant or analog thereof, or a cyclic peptidomimetic as defined herein, with between 10-60 (in particular between 15-60, more particularly between 10-55, and even more particularly between 15-55) amino acids or with between 10-35 (in particular between 15-35, more particularly between 10-30, and even more particularly between 15-30) amino acids, comprising a peptide, a variant or analog thereof, or a peptidomimetic having the following general formula (I) (hereinafter may also be referred to as compound (I) or peptide (I)):

PEP(A)-LINKER (I)

[0578] wherein one end of LINKER interacts covalently with one end of PEP(A); wherein PEP(A) comprises PEP1 or PEP12; wherein LINKER is a linear or branched organic divalent radical, moiety or compound having a molecular weight (Mw) comprised between 450 and 4,500 Daltons, in particular comprised between about 600 and about 4,500 Da, more particularly between about 600 and about 4,000 Da, and even more particularly between about 600 and about 3,500 Da.

[0579] In one aspect, the present disclosure thus provides a functionalised bioactive carrier comprising a (modified) cyclic GFR-binding compound, wherein said (modified) cyclic GFR-binding compound comprises compound (I), and wherein PEP(A) further comprises PEP3.

[0580] In one aspect, the present disclosure thus provides a functionalised bioactive carrier comprising a (modified) cyclic GFR-binding compound, wherein said (modified) cyclic GFR-binding compound comprises compound (I), and wherein PEP(A) further comprises PEP5.

[0581] In one aspect, the present disclosure thus provides a functionalised bioactive carrier comprising a (modified) cyclic GFR-binding compound, wherein said (modified) cyclic GFR-binding compound comprises compound (I), and wherein PEP(A) further comprises PEP9.

[0582] In one aspect, the present disclosure thus provides a functionalised bioactive carrier comprising a (modified) cyclic GFR-binding compound, wherein said (modified) cyclic GFR-binding compound comprises compound (I), and wherein PEP(A) further comprises PEP3 and PEP7.

[0583] In one aspect, the present disclosure thus provides a functionalised bioactive carrier comprising a (modified) cyclic GFR-binding compound, wherein said (modified) cyclic GFR-binding compound comprises compound (I), and wherein PEP(A) further comprises PEP5 and PEP7.

[0584] In one aspect, the present disclosure thus provides a functionalised bioactive carrier comprising a (modified) cyclic GFR-binding compound, wherein said (modified) cyclic GFR-binding compound (before any modifications) is a cyclic peptide, a variant or analog thereof, or a cyclic peptidomimetic as defined herein, with between 10-60 (in particular between 15-60, more particularly between 10-55, and even more particularly between 15-55) amino acids or with between 10-35 (in particular between 15-35, more particularly between 10-30, and even more particularly between 15-30) amino acids, comprising a peptide, a variant or analog thereof, or a peptidomimetic having the following general formula (II) (hereinafter may also be referred to as compound (II) or peptide (II)):

PEP(C)-PEP12-LINKER (II)

[0585] wherein LINKER is a linear or branched organic divalent radical, moiety or compound having a molecular weight (Mw) comprised between 450 and 4,500 Daltons, in particular comprised between about 600 and about 4,500 Da, more particularly between about 600 and about 4,000 Da, and even more particularly between about 600 and about 3,500 Da; wherein PEP12 is a peptide with 8 amino acids of formula PEP1-AA¹⁷-PEP11 as defined herein; wherein PEP2 is a peptide with five amino acids as already defined herein; wherein one end of PEP(C) interacts covalently with PEP12 via one end of PEP1; wherein one end of LINKER interacts covalently with one end of PEP12 via one end of PEP11; wherein PEP(C) is a peptide with at least 5 amino acids, in particular a peptide with between 5 and 12 amino acids.

[0586] In one aspect, In one aspect, the present disclosure thus provides a functionalised bioactive carrier comprising a (modified) cyclic GFR-binding compound, wherein said (modified) cyclic GFR-binding compound comprises compound (II), and wherein PEP(C) comprises PEP3.

[0587] In one aspect, In one aspect, the present disclosure thus provides a functionalised bioactive carrier comprising a (modified) cyclic GFR-binding compound, wherein said (modified) cyclic GFR-binding compound comprises compound (II), and wherein PEP(C) comprises PEP5. In one particular example, PEP(C) is PEP5.

[0588] In one aspect, In one aspect, the present disclosure thus provides a functionalised bioactive carrier comprising a (modified) cyclic GFR-binding compound, wherein said (modified) cyclic GFR-binding compound comprises compound (II), and wherein PEP(C) comprises PEP9. In one particular example, PEP(C) is PEP9.

[0589] In one aspect, In one aspect, the present disclosure thus provides a functionalised bioactive carrier comprising a (modified) cyclic GFR-binding compound, wherein said (modified) cyclic GFR-binding compound comprises compound (II), and wherein PEP(C) comprises PEP3 and PEP7.

[0590] In one aspect, In one aspect, the present disclosure thus provides a functionalised bioactive carrier comprising a (modified) cyclic GFR-binding compound, wherein said (modified) cyclic GFR-binding compound comprises compound (II), and wherein PEP(C) comprises PEP5 and PEP7.

[0591] In one aspect, In one aspect, the present disclosure thus provides a functionalised bioactive carrier comprising a (modified) cyclic GFR-binding compound, wherein said (modified) cyclic GFR-binding compound comprises compound (II), and wherein PEP(C) is PEP5 or PEP9.

[0592] In one aspect, the present disclosure thus provides a functionalised bioactive carrier comprising a (modified) cyclic GFR-binding compound, wherein said (modified) cyclic GFR-binding compound (before any modifications) is a cyclic peptide, a variant or analog thereof, or a cyclic peptidomimetic as defined herein, with between 10-60 (in particular between 15-60, more particularly between 10-55, and even more particularly between 15-55) amino acids or with between 10-35 (in particular between 15-35, more particularly between 10-30, and even more particularly between 15-30) amino acids, comprising a peptide, a variant or analog thereof, or a peptidomimetic having the following general formula (III) (hereinafter may also be referred to as compound (III) or peptide (III)):

PEP7-PEP5-PEP12-LINKER (III)

[0593] wherein LINKER is a linear or branched organic divalent radical, moiety or compound having a molecular weight (Mw) comprised between 450 and 4,500 Daltons, in particular comprised between about 600 and about 4,500 Da, more particularly between about 600 and about 4,000 Da, and even more particularly between about 600 and about 3,500 Da; wherein PEP12 is a peptide with 8 amino acids of formula PEP1-AA¹⁷-PEP11 as defined herein; wherein PEP5 is a peptide with five amino acids as already defined herein; wherein PEP7 an amino acid or a peptide with between two and seven amino acids as already defined herein; wherein one end of LINKER interacts covalently with one end of PEP12 via AA²⁰; wherein one end of PEP5 interacts covalently with another end of PEP12 via AA¹²; wherein another end of PEP5 interacts covalently with one end of PEP7 via AA⁸.

[0594] In one aspect, the present disclosure thus provides a functionalised bioactive carrier comprising a (modified) cyclic GFR-binding compound, wherein said (modified) cyclic GFR-binding compound (before any modifications) is a cyclic peptide, a variant or analog thereof, or a cyclic peptidomimetic as defined herein, with between 10-60 (in particular between 15-60, more particularly between 10-55, and even more particularly between 15-55) amino acids or with between 10-35 (in particular between 15-35, more particularly between 10-30, and even more particularly between 15-30) amino acids, comprising a peptide, a variant or analog thereof, or a peptidomimetic having the following general formula (IV) (hereinafter may also be referred to as compound (IV) or peptide (IV)):

AA¹-AA²-AA³-AA⁴-AA⁵-AA⁶-AA⁷-AA⁸-AA⁹-AA¹⁰-AA¹¹-AA¹²-AA¹³-AA¹⁴-AA¹⁵-AA¹⁶-AA¹⁷-AA¹⁸-AA¹⁹-AA²⁰-LINKER (IV)

[0595] wherein LINKER is a linear or branched organic divalent radical, moiety or compound having a molecular weight (Mw) comprised between 450 and 4,500 Daltons, in particular comprised between about 600 and about 4,500 Da, more particularly between about 600 and about 4,000 Da, and even more particularly between about 600 and about 3,500 Da; wherein AA¹-AA²-AA³-AA⁴-AA⁵-AA⁶-AA⁷ is PEP7 as defined herein; wherein AA¹³-AA¹⁴-AA¹⁵-AA¹⁶-AA¹⁷-AA¹⁸-AA¹⁹-AA²⁰ is PEP12 as defined herein; wherein AA⁸-AA⁹-AA¹⁰ is PEP3 as defined herein; wherein AA¹¹ and AA¹² are as defined herein; wherein one end of LINKER interacts covalently with AA²⁰; wherein AA¹ may be an N-terminal amino acid or a C-terminal amino acid; wherein AA²⁰ may be an N-terminal amino acid or a C-terminal amino acid.

[0596] In one aspect, the present disclosure thus provides a functionalised bioactive carrier comprising a (modified) cyclic GFR-binding compound, wherein said (modified) cyclic GFR-binding compound (before any modifications) is a cyclic peptide, a variant or analog thereof, or a cyclic peptidomimetic as defined herein, with between 10-60 (in particular between 15-60, more particularly between 10-55, and even more particularly between 15-55) amino acids or with between 10-35 (in particular between 15-35, more particularly between 10-30, and even more particularly between 15-30) amino acids, having any one of the following schematic general formulae (V) to (XVIII) (hereinafter may also be referred to as compounds (V) to (XVIII) or peptides (V) to (XVIII)):

[chemical structure]

[chemical structure]

[0597] wherein LINKER is a linear or branched organic divalent radical, moiety or compound having a molecular weight (Mw) comprised between 450 and 4,500 Daltons, in particular comprised between about 600 and about 4,500 Da, more particularly between about 600 and about 4,000 Da, and even more particularly between about 600 and about 3,500 Da; wherein PEP12 is a peptide with 8 amino acids of formula PEP1-AA¹⁷-PEP11 as defined herein; wherein PEP5 is a peptide with five amino acids as already defined herein; wherein PEP7 an amino acid or a peptide with between two and seven amino acids as already defined herein; wherein PEP9 is a peptide with between six and twelve amino acids; wherein curved lines represents covalent bonds between LINKERs and PEP1 to PEP12. Curved lines' lengths may not be representative of the actual relative distance between the LINKERs and PEP1 to PEP12.

[0598] In one aspect, the present disclosure thus provides a functionalised bioactive carrier comprising a (modified) cyclic GFR-binding compound, wherein said (modified) cyclic GFR-binding compound (before any modifications) is a cyclic peptide, a variant or analog thereof, or a cyclic peptidomimetic as defined herein, with between 10-60 (in particular between 15-60, more particularly between 10-55, and even more particularly between 15-55) amino acids or with between 10-35 (in particular between 15-35, more particularly between 10-30, and even more particularly between 15-30) amino acids, having any one of the following schematic general formulae (XIX) to (XXI) (hereinafter may also be referred to as compounds (XIX) to (XXI) or peptides (XIX) to (XXI)):

[chemical structure]

[0599] wherein LINKER is a linear or branched organic divalent radical, moiety or compound having a molecular weight (Mw) comprised between 450 and 4,500 Daltons, in particular comprised between about 600 and about 4,500 Da, more particularly between about 600 and about 4,000 Da, and even more particularly between about 600 and about 3,500 Da; wherein AA¹³-AA¹⁴-AA¹⁵-AA¹⁶-AA¹⁷-AA¹⁸-AA¹⁹-AA²⁰ is PEP12 as defined herein; wherein AA⁸-AA⁹-AA¹⁰ is PEP3 as defined herein; wherein AA¹¹ and AA¹² are as defined herein; wherein one end of LINKER interacts covalently with AA¹⁶ or AA²⁰; wherein another end of LINKER interacts covalently with AA⁸ or AA¹³.

[0600] In one aspect, the present disclosure provides a functionalised bioactive carrier comprising a (modified) cyclic GFR-binding compound, wherein said (modified) cyclic GFR-binding compound (before any modifications) is a cyclic peptide, a variant or analog thereof, or a cyclic peptidomimetic as defined herein, with between 10-60 (in particular between 15-60, more particularly between 10-55, and even more particularly between 15-55) amino acids or with between 10-35 (in particular between 15-35, more particularly between 10-30, and even more particularly between 15-30) amino acids, having any one of the following schematic general formulae (XXIII) to (XXX):

[chemical structure]

[chemical structure]

[0601] wherein curved lines represents covalent bonds between LINKERs, PEPs and AAs “boxes”. Curved lines' lengths may not be representative of the actual relative distance between the LINKERs, PEPs and AAs.

[0602] In one aspect, the present disclosure provides a functionalised bioactive carrier comprising a (modified) cyclic GFR-binding compound, wherein said (modified) cyclic GFR-binding compounds may be any one of SEQ ID NO: 1 to 12519.

[0603] The present disclosure provides a functionalised bioactive carrier comprising a (modified) cyclic GFR-binding compound, wherein all of PEP1, PEP3, PEP5, PEP9, PEP12, PEP11 and AA¹⁷, pairs and triplets thereof, disclaimers and provisos, are as already defined herein.

[0604] Suitable covalent association or functionalization techniques for implementing embodiments of the present invention include, but are not limited to, reductive amination coupling or photo-grafting such as described in H. Freichel et al., Macromol. Rapid Commun. 2011, 32, 616-621 and V. Pourcelle et al., Biomacromol. 2009, 10, 966-974, the content of which is hereby incorporated by reference in its entirety.

[0605] In one aspect, the present disclosure provides a production method or process useful for producing a functionalised bioactive carrier according to the present disclosure wherein said bioactive carrier is a biomaterial such as a ceramic or a titanium, comprising, or exclusively consisting of, the contacting of a compound of formula (C—I) and a bioactive carrier as defined herein under suitable covalent-bond formation conditions thereby forming at least one covalent bond between said compound (C—I) and said bioactive carrier thus forming a functionalised bioactive carrier according to the present disclosure:

[chemical structure]

[0606] wherein X is Si; wherein Y is a divalent organic linker; wherein A is a (modified) cyclic GFR-binding compound according to the present disclosure, wherein R¹ and R² are both independently an organic spacing-compound other than a leaving group as defined herein, and wherein R³ is a leaving group as defined herein;

[0607] In one particular example, a process or method which may be used to functionally associate or combine a (modified) cyclic GFR-binding compound with a bioactive carrier such as a ceramic or a titanium is shown in Scheme 1:

[chemical structure]

[0608] Such syntheses involve the formation of a covalent interaction (or association) between a (modified) cyclic GFR-binding compound (represented as (A)-SH in Scheme 1) and a bioactive carrier as defined herein.

[0609] In one particular example, a process or method which may be used to functionally associate or combine a (modified) cyclic GFR-binding compound with a bioactive carrier is a method for covalent functionalization or depositing of a (modified) cyclic GFR-binding compound onto a polyetheretherketone polymer (PEEK) surface wherein (i) the polymer is treated with ethylene diamine (NH₂═NH₂) to create NH₂ functions on a PEEK surface from ketone (CO) functions and (ii) the hereby modified PEEK-NH₂ polymer is immersed in a solution of a chosen hetero-bifunctional cross-linker such as 3-succinimidyl-3-maleimidopropionate thereby reacting the maleimide group with a (modified) cyclic GFR-binding compound through e.g. a thiol group thereof.

[0610] In one particular example, a process or method which may be used to functionally associate or combine a (modified) cyclic GFR-binding compound with a bioactive carrier is a method for covalent functionalization or depositing of a (modified) cyclic GFR-binding compound onto a polylactic acid (PLLA) polymer wherein (i) the polymer is immersed in a solution containing, for instance, (dimethylaminopropyl)-3-ethylcarbodiimide hydrochloride+N-hydroxysuccinimide in (2-(N-morpholino)-ethanesulfonic acid and then (ii) rinsed using e.g. MilliQ water.

[0611] Leaving groups: As used herein, unless indicated otherwise or contradictory in context, the term “leaving group” means a molecular fragment which possesses the ability to depart with a pair of electrons in a heterolytic bond cleavage. Leaving groups are anions or neutral molecules and possess the ability to stabilize the additional electron density that results from bond heterolysis. Common anionic leaving groups are halogen atoms such as chlorine (CI), bromine (Br), and iodine (I), which leaves as a chloride ion (Cr), a bromide ion (Br⁻) and an iodide ion (F), respectively. Other leaving groups include sulfonate esters, such as tosylate (TsO⁻). Conventional neutral molecule leaving groups are water and ammonia. Suitable as leaving groups for implementing embodiments of the invention preferably include the group consisting of a halogen, a substituted or unsubstituted alkoxy group (—OR), a substituted or unsubstituted aryloxy or heteroaryloxy group (—OAr), a substituted or unsubstituted alkylcarbonyloxy group (—O₂CR), a substituted or unsubstituted arylcarbonyloxy or heteroarylcarbonyloxy group (—O₂CAr), a substituted or unsubstituted alkylsulfonyloxy group (—O₃SR), a substituted or unsubstituted arylsulfonyloxy or heteroarylsulfonyloxy group (—O₃SAr). Substituents of leaving groups include halogens, alkyl (preferably C1 to C5-alkyl) groups and alkoxy (preferably C1 to C5-alkoxy) groups.

[0612] Y Group

[0613] In the present disclosure, the Y group is not aimed at being particularly limited and any moiety comprising at least one atom and having the ability to covalently or non-covalently, preferably covalently, link or interact with the X and A groups as defined herein thereby providing a stable connection between an active substance A and the X group as defined herein, is, unless contradictory or non-adapted in context, suitable for implementing embodiments of the present disclosure and is comprised within the scope of the invention.

[0614] Thus, in the present description and unless otherwise indicated, the term “linker”, when used in relation to a Y group, means any organic moiety comprising at least one atom and having the ability to interact covalently or non-covalently with an active substance A and covalently interact with an X group as defined herein.

[0615] In one example, Y groups include divalent organic radicals selected from the group consisting of a saturated or unsaturated, preferably saturated, hydrocarbon chain comprising between 1 and 30 carbon atoms, wherein said hydrocarbon chain is optionally interrupted by one or more non-carbon atom, preferably between 1 and 16, between 1 and 12 or between 1 and 8 non-carbon atoms as appropriate, wherein said non-carbon atom is selected, for instance, from the group consisting of —O—, —S—, —C(═O), —SO₂—, —N(Ri)(C═O)—, —N(Ri)-, and the following radical:

[chemical structure]

[0616] wherein Ri is selected from the group consisting of a hydrogen atom, a C1-C6 alkyl group and a aryl group, and wherein said hydrocarbon chain is non-substituted or substituted, by at least one radical selected from the group consisting of a halogen, a hydroxyl group, a C1-C20 alkyl group and a aryl group.

[0617] Suitable as Y groups for implementing embodiments of the invention include saturated or unsaturated hydrocarbon chains comprising between 1 and 20 carbon atoms, saturated or unsaturated hydrocarbon chains comprising between 1 and 10 carbon atoms, saturated or unsaturated hydrocarbon chains comprising between 1 and 5 carbon atoms, saturated or unsaturated hydrocarbon chains comprising 1, 2 or 3 carbon atoms, all of which being specifically and individually preferred.

[0618] Also suitable as Y groups for implementing embodiments of the invention include saturated or unsaturated hydrocarbon chains comprising between 1 and 20 carbon atoms, saturated or unsaturated hydrocarbon chains comprising between 1 and 10 carbon atoms, saturated or unsaturated hydrocarbon chains comprising between 1 and 5 carbon atoms, saturated or unsaturated hydrocarbon chains comprising 1, 2 or 3 carbon atoms, and in which said hydrocarbon chain is optionally interrupted by one or more, preferably between 1 and 16, between 1 and 12 or between 1 and 8, non-carbon atom, selected from the group consisting of an oxygen atom, a nitrogen atom, a carbonyl group and/or the following radical:

[chemical structure]

[0619] all of which being specifically preferred and individually contemplated.

[0620] Also suitable as Y groups for implementing embodiments of the invention is:

[chemical structure]

[0621] wherein n is comprised between 1 and 29, in particular between 1 and 5; and wherein m is comprised between 1 and 29, in particular between 1 and 5.

[0622] Suitable covalent-bond formation conditions: As used herein, unless indicated otherwise or contradictory in context, the term “suitable covalent-bond formation conditions” means reaction conditions such as pressure, temperature, reagent quantities, solvent's type and quantity, or stirring, under which starting materials may contact and provide at least one further material resulting from the formation of at least one covalent bond between said starting materials. Suitable as covalent-bond formation conditions for implementing embodiments of the present invention preferably include substantially atmospheric conditions.

[0623] Organic spacing-compound: In the present description and unless otherwise indicated, the term “organic spacing compound” means an organic chemical radical (preferably monofunctional radical) having the ability to create a steric effect/hindrance and/or electronic effect/hindrance in a direct vicinity of a (modified) cyclic GFR-binding compound of the present disclosure. Suitable organic spacing compounds include, but are not limited to, monovalent organic radicals independently selected from the group consisting of a saturated or unsaturated hydrocarbon chain of at most 20 nanometres (nm) in length, preferably at most 10 nm, 5 nm, 1 nm, 0.5 nm, 0.1 nm, 0.05 nm or 0.01 nm, wherein said hydrocarbon chain is optionally interrupted by one or more, preferably between 1 and 16, between 1 and 12 or between 1 and 8 non-carbon atoms as appropriate, wherein said non-carbon atom is selected from the group consisting of —O—, —S—, —C(═O), —SO₂—, —N(R′)(C═O)—, and —N(R′)—, wherein R′ is selected from the group consisting of a hydrogen atom, a C1-C6 alkyl group and an aryl group, and wherein said hydrocarbon chain is non-substituted or substituted by at least one radical selected from the group consisting of a halogen, a hydroxyl group, a C1-C20 alkyl group and an aryl group. In particular, organic spacing compounds include saturated or unsaturated hydrocarbon chains comprising between 1 and 80 carbon atoms, saturated or unsaturated hydrocarbon chains comprising between 1 and 60 carbon atoms, saturated or unsaturated hydrocarbon chains comprising between 1 and 40 carbon atoms, saturated or unsaturated hydrocarbon chains comprising between 1 and 20 carbon atoms, saturated or unsaturated hydrocarbon chains comprising between 1 and 10 carbon atoms, saturated hydrocarbon chains comprising 1, 2, 3, 4, 5 or 6 carbon atoms, all of which being specifically and individually preferred. In one example, the saturated hydrocarbon chain may be methyl, ethyl, propyl, butyl or pentyl. In one example, said unsaturated hydrocarbon chain may be ethylene, propene, 1- or 2-butene, 1-, 2- or 3-pentene, acetylene, propyne, 1- or 2-butyne, 1-, 2- or 3-pentyne.

[0624] Saturated hydrocarbon chain: In the present description and unless otherwise indicated, the terms “saturated hydrocarbon chain” means a chain of carbon atoms linked together by single bonds and has hydrogen atoms filling all of the other bonding orbitals of the carbon atoms.

[0625] Unsaturated hydrocarbon chain: In the present description and unless otherwise indicated, the terms “unsaturated hydrocarbon chain” means a chain of carbon that contains carbon-carbon double bonds or triple bonds, such as those found in alkenes or alkynes, respectively.

[0626] Atmospheric conditions: As used herein, unless indicated otherwise or contradictory in context, the term “atmospheric conditions” or “ambient conditions”, which are interchangeably used, refers to conditions which may be found naturally at an experimentation location. For example, in certain embodiments, typical atmospheric conditions in a chemistry/biology laboratory are a temperature of between about 15° C. and about 35° C. and a pressure of about 1 atm.

[0627] Solution: As used herein, unless indicated otherwise or contradictory in context, the term “solution” means a homogeneous mixture composed of only one phase, which is stable, which does not allow beam of light to scatter, in which the particles of solute cannot be seen by naked eye and from which a solute cannot be separated by filtration.

[0628] Suspension: As used herein, unless indicated otherwise or contradictory in context, the term “suspension” means a heterogeneous mixture containing solid particles that are sufficiently large for sedimentation. Typically, said solid particles are larger than one micrometer. In general, the internal phase (solid) is dispersed throughout the external phase (fluid) through mechanical agitation, with the use of certain excipients or suspending agents.

[0629] Suitable non-covalent association or functionalization techniques for implementing embodiments of the present invention include, but are not limited to, association(s) between a bioactive carrier-affinity containing group as already defined herein and at least part of a bioactive carrier. Such association(s) involves the formation of at least one non-covalent interaction (or attachment) between a (modified) cyclic GFR-binding compound and a bioactive carrier as defined herein.

[0630] In one example, said functionalised bioactive carrier is functionally associated with at least two, at least three, at least four, at least five, at least six, at least seven, at least eight, at least nine or at least ten (modified) cyclic GFR-binding compounds, each possessing a different and distinct chemical structure.

[0631] In one example, said functionalised bioactive carrier does not comprise a layer of polysiloxane.

[0632] For example, in certain embodiments, a functionalised bioactive carrier as defined herein comprises at least one (modified) cyclic GFR-binding compound, and at least one bioactive carrier, wherein said bioactive carrier:
[0633] has a porosity (or average pore diameter) comprised between 1 nm and 1000 μm, as measured by scanning electronic microscopy for pore sizes within the supra-nanometre range and by atomic force microscopy for pore sizes within the nanometre range, and/or
[0634] comprises a stiffness of at least 5 kPa, preferably at least 35 kPa, as measured by Dynamic Mechanical Analysis, and/or
[0635] is selected from the group consisting of biopolymers (collagen, fibrin, . . . etc), synthetic polymers (PEEK, PET, . . . etc), solid materials (Titanium, Metals . . . etc) and ceramics (Hydroxyapatite, Beta-tricalcium Phosphate, Biphasic Calcium Phosphate . . . etc), and/or
[0636] comprises a density or concentration of associated compound (I) comprised between 0.05×10⁻¹² mol/mm² and 50×10⁻¹² mol/mm², as measured by conventional fluorescence microscopy or calculated theoretically on the basis of the peptide size, and/or
[0637] does not comprise a layer of polysiloxane.

[0638] Porosity: As used herein, unless indicated otherwise or contradictory in context, the term “porosity” refers to the measure of the void spaces in a substance or material, and is a fraction of the volume of voids over the total volume, between 0 and 1, or as a percentage between 0 and 100%. There are many ways to test and measure the porosity of a substance or material, but for the purpose of the present disclosure, and for the avoidance of any doubts, porosity values are provided in manometers (nm) as obtained using atomic force microscopy for small pore diameters (up to 100 nm) and scanning electron microscopy for larger pore sizes.

[0639] Stiffness: As used herein, unless indicated otherwise or contradictory in context, the term “stiffness” refers to the rigidity of a substance or material i.e. the extent to which it resists deformation in response to an applied force. There are many ways to test and measure the stiffness of a substance or material, but for the purpose of the present disclosure, and for the avoidance of any doubts, stiffness values are provided in Pascal (Pa) as obtained using Dynamic Mechanical Analysis (DMA). Particularly preferred stiffness values are comprised between 1 kPa and 100 kPa and not more than 5 GPa depending on the tissue to be regenerated or repaired.

[0640] As already stated, the nature of the biomaterial is an important parameter. Particularly good results have been obtained using bioactive carriers composed mostly with the main material component of the tissue to be regenerated and/or repaired. This generally allows for a better integration of the bioactive carrier, a better resorption from the surrounding cells already present and therefore a better regeneration or repair of the targeted tissue to be achieved.

[0641] In one example, said bioactive carrier for use in neuroregeneration-related applications has a stiffness comprised between about 0.01 kPa and about 3 kPa, preferably between about 0.01 kPa and about 1 kPa. In one example, said bioactive carrier for use in muscle, cartilage and T/L-related applications has a stiffness comprised between about 3 kPa and about 200 kPa, preferably between about 10 kPa and about 30 kPa. In one example, said bioactive carrier for use in bone-related applications has a stiffness comprised between about 30 kPa and about 3 GPa, preferably between about 70 kPa and about 200 kPa for instance in applications such as the treatment or prevention of osteoporosis and bone tissue regeneration. In one example, said bioactive carrier for use in hair-related applications has a stiffness comprised between about 0.01 kPa and about 200 kPa, preferably between about 3 kPa and about 70 kPa. In one example, said bioactive carrier for use in endothelization-related applications has a stiffness comprised between about 500 kPa and about 2.5 GPa. In one example, said bioactive carrier for use in angiogenesis-related applications has a stiffness comprised between about 0.01 kPa and about 100 kPa. In one example, said bioactive carrier for use in wound healing and skin-related applications has a stiffness comprised between about 0.01 kPa and about 70 kPa. For example, in certain embodiments, a pharmaceutical, dermatological or cosmetic association or combination of the present invention may be in the form of a dry, sterile powder.

[0642] In one particular example, the concentration or density (as defined herein) of a (modified) cyclic GFR-binding compound in, or on the surface of, a bioactive carrier as defined herein is comprised between 0.05 and 50 pmol/mm², in particular comprised between 0.1 and 30 pmol/mm², comprised between 0.1 and 10 pmol/mm², comprised between 0.1 and 5 pmol/mm², or comprised between 0.1 and 2 pmol/mm², each range being preferred and specifically contemplated to be combined with any other numerical or non-numerical ranges as described herein. Most particularly, the density is comprised between 0.2 and 2 pmol/mm².

### VII. Medical Devices

[0643] For in-vivo administration, cyclic GFR-binding compounds, modified cyclic GFR-binding compounds or functionalised bioactive carriers of the present invention may be injected e.g. using an appropriate syringe, to a specific target site so that they may be delivered directly to the interior of e.g. a body articulation or under the skin in close proximity with the cells to be treated via, for instance, a PTD or cell-permeable peptide. Alternately, a medical device or implant (or implantable medical device) comprising such cyclic GFR-binding compounds, modified cyclic GFR-binding compounds or functionalised bioactive carriers may be used. Implants may contain reservoirs in which to place the cyclic GFR-binding compound, modified cyclic GFR-binding compound or functionalised bioactive carrier of the invention for release into the surrounding tissue, or may comprise a porous composition which may be soaked in a solution containing one or more cyclic GFR-binding compounds or modified cyclic GFR-binding compounds of the present disclosure prior to implantation.

[0644] Hydrogels, time-release capsules or spheres, liposomes, microspheres, nanospheres, biodegradable polymers, or other such drug delivery systems may also be employed to deliver cyclic GFR-binding compounds of the present invention to target cells and tissues. U.S. Pat. No. 6,475,516, for example, provides hydrogels being covalently bound to the surface of an in-dwelling medical device such as an implant, which may be used with cyclic GFR-binding compounds of the present disclosure.

[0645] In one aspect, the present disclosure provides a medical device comprising at least one GFR-compound, modified cyclic GFR-binding compound or functionalised bioactive carrier as defined herein. In one particular example, the medical device of the invention may be, partly or entirely, made of a functionalised bioactive carrier as defined herein or contain, for example, in certain embodiments, within a cavity thereof, said functionalised bioactive carrier.

[0646] In one example, said medical device may comprise between 1 wt % and 100 wt % of a functionalised bioactive carrier of the invention with respect to the total weight of the medical device. In one example, said medical device comprises between about 50 wt % and 100 wt %, between about 60 wt % and 100 wt %, between about 70 wt % and 100 wt %, between about 80 wt % and 100 wt %, between about 90 wt % and 100 wt % of a functionalised bioactive carrier of the invention with respect to the total weight of the medical device, all of which being specifically and individually preferred.

[0647] In an example, at least one part of a surface of said medical device comprises a cyclic GFR-binding compound, a modified cyclic GFR-binding compound or a functionalised bioactive carrier of the invention. For example, in certain embodiments, said medical device is preferably an implantable medical device.

[0648] Also suitable as medical devices for implementing embodiments of the present invention include stents, stiches, powders, granules, sponges, putties, injectable and non-injectable liquids, curable compositions, moldable compositions, membranes, glues, sprays, pills, filaments, prosthesis, or combinations thereof.

[0649] In one aspect, the present disclosure provides a bone graft material comprising a cyclic GFR-binding compound or a modified cyclic GFR-binding compound of the invention and a collagen as defined herein. In the present description and unless otherwise indicated, the term “bone graft material” means a material suitable for bone grafting.

### VIII. Antibody:Cyclic GFR-Binding Compound Complex

[0650] In one aspect, the present disclosure provides an antibody:cyclic GFR-binding compound complex comprising at least one (modified) cyclic GFR-binding compound and at least one antibody or any functional fragment thereof; wherein said (modified) cyclic GFR-binding compound is as defined herein.

[0651] Antibody: As used herein, unless indicated otherwise or contradictory in context, the terms “antibody” or “antibodies” refer to a light chain and heavy chain protein of an antibody that are encoded by a gene or genes that are either a naturally occurring gene or a codon-optimized gene. The antibody light chain and heavy chain genes may be human antibody light chain and heavy chain genes. Antibodies, or immunoglobulins, are proteins produced by cells of the immune system to identify and neutralize foreign substances, such as bacteria, viruses, or improperly proliferating native cells. Immunoglobulins are one class of desired globulin molecules and include, but are not limited to, IgG, IgM, IgA, IgD, IgE, IgY, lambda chains, kappa chains and fragments thereof; bi-specific antibodies, and fragments thereof; scFv fragments, Fc fragments, and Fab fragments as well as dimeric, trimeric and oligomeric forms of antibody fragments. Suitable antibodies include, but are not limited to, naturally occurring antibodies, animal-specific antibodies, human antibodies, humanized antibodies, autoantibodies and hybrid antibodies. Suitable antibodies also include antibodies with the ability to bind specific ligands. Suitable antibodies also include, but are not limited to, primary antibodies, secondary antibodies, designer antibodies, anti-protein antibodies, anti-peptide antibodies, anti-DNA antibodies, anti-RNA antibodies, anti-hormone antibodies, anti-hypophysiotropic peptides, antibodies against non-natural antigens, anti-anterior pituitary hormone antibodies, anti-posterior pituitary hormone antibodies, anti-venom antibodies, anti-tumor marker antibodies, antibodies directed against epitopes associated with infectious disease, including, anti-viral, anti-bacterial, anti-protozoal, anti-fungal, anti-parasitic, anti-receptor, anti-lipid, anti-phospholipid, anti-growth factor, anti-cytokine, anti-monokine, antiidiotype, and anti-accessory (presentation) protein antibodies. Suitable antibodies also include, but are not limited to, 3F8, 8H9, Abagovomab, Abciximab, Abituzumab, Abrilumab, Actoxumab, Adalimumab, Adecatumumab, Aducanumab, Afelimomab, Afutuzumab, Alacizumab pegol, ALD518, Alemtuzumab, Alirocumab, Altumomab pentetate, Amatuximab, Anatumomab mafenatox, Anetumab ravtansine, Anifrolumab, Anrukinzumab, Apolizumab, Arcitumomab, Ascrinvacumab, Aselizumab, Atezolizumab, Atinumab, Atlizumab, Atorolimumab, Bapineuzumab, Basiliximab, Bavituximab, Bectumomab, Begelomab, Belimumab, Benralizumab, Bertilimumab, Besilesomab, Bevacizumab, Bezlotoxumab, Biciromab, Bimagrumab, Bimekizumab, Bivatuzumab mertansine, Blinatumomab, Blosozumab, Bococizumab, Brentuximab vedotin, Briakinumab, Brodalumab, Brolucizumab, Brontictuzumab, Canakinumab, Cantuzumab mertansine, Cantuzumab ravtansine, Caplacizumab, Capromab pendetide, Carlumab, Catumaxomab, cBR96-doxorubicin immunoconjugate, CC49, Cedelizumab, Certolizumab pegol, Cetuximab, Ch.14.18, Citatuzumab bogatox, Cixutumumab, Clazakizumab, Clenoliximab, Clivatuzumab tetraxetan, Codrituzumab, Coltuximab ravtansine, Conatumumab, Concizumab, CR6261, Crenezumab, Dacetuzumab, Daclizumab, Dalotuzumab, Dapirolizumab pegol, Daratumumab, Dectrekumab, Demcizumab, Denintuzumab mafodotin, Denosumab, Derlotuximab biotin, Detumomab, Dinutuximab, Diridavumab, Dorlimomab aritox, Drozitumab, Duligotumab, Dupilumab, Durvalumab, Dusigitumab, Ecromeximab, Eculizumab, Edobacomab, Edrecolomab, Efalizumab, Efungumab, Eldelumab, Elgemtumab, Elotuzumab, Elsilimomab, Emactuzumab, Emibetuzumab, Enavatuzumab, Enfortumab vedotin, Enlimomab pegol, Enoblituzumab, Enokizumab, Enoticumab, Ensituximab, Epitumomab cituxetan, Epratuzumab, Erlizumab, Ertumaxomab, Etaracizumab, Etrolizumab, Evinacumab, Evolocumab, Exbivirumab, Fanolesomab, Faralimomab, Farletuzumab, Fasinumab, FBTA05, Felvizumab, Fezakinumab, Ficlatuzumab, Figitumumab, Firivumab, Flanvotumab, Fletikumab, Fontolizumab, Foralumab, Foravirumab, Fresolimumab, Fulranumab, Futuximab, Galiximab, Ganitumab, Gantenerumab, Gavilimomab, Gemtuzumab ozogamicin, Gevokizumab, Girentuximab, Glembatumumab vedotin, Golimumab, Gomiliximab, Guselkumab, Ibalizumab, Ibritumomab tiuxetan, Icrucumab, Idarucizumab, Igovomab, IMAB362, Imalumab, Imciromab, Imgatuzumab, Inclacumab, Indatuximab ravtansine, Indusatumab vedotin, Infliximab, Inolimomab, Inotuzumab ozogamicin, Intetumumab, Ipilimumab, Iratumumab, Isatuximab, Itolizumab, Ixekizumab, Keliximab, Labetuzumab, Lambrolizumab, Lampalizumab, Lebrikizumab, Lemalesomab, Lenzilumab, Lerdelimumab, Lexatumumab, Libivirumab, Lifastuzumab vedotin, Ligelizumab, Lilotomab satetraxetan, Lintuzumab, Lirilumab, Lodelcizumab, Lokivetmab, Lorvotuzumab mertansine, Lucatumumab, Lulizumab pegol, Lumiliximab, Lumretuzumab, Mapatumumab, Margetuximab, Maslimomab, Matuzumab, Mavrilimumab, Mepolizumab, Metelimumab, Milatuzumab, Minretumomab, Mirvetuximab soravtansine, Mitumomab, Mogamulizumab, Morolimumab, Motavizumab, Moxetumomab pasudotox, Muromonab-CD3, Nacolomab tafenatox, Namilumab, Naptumomab estafenatox, Narnatumab, Natalizumab, Nebacumab, Necitumumab, Nemolizumab, Nerelimomab, Nesvacumab, Nimotuzumab, Nivolumab, Nofetumomab merpentan, Obiltoxaximab, Ocaratuzumab, Ocrelizumab, Odulimomab, Ofatumumab, Olaratumab, Olokizumab, Omalizumab, Onartuzumab, Ontuxizumab, Opicinumab, Oportuzumab monatox, Oregovomab, Orticumab, Otelixizumab, Otlertuzumab, Oxelumab, Ozanezumab, Ozoralizumab, Pagibaximab, Palivizumab, Panitumumab, Pankomab, Panobacumab, Parsatuzumab, Pascolizumab, Pasotuxizumab, Pateclizumab, Patritumab, Pembrolizumab, Pemtumomab, Perakizumab, Pertuzumab, Pexelizumab, Pidilizumab, Pinatuzumab vedotin, Pintumomab, Placulumab, Polatuzumab vedotin, Ponezumab, Priliximab, Pritoxaximab, Pritumumab, PRO 140, Quilizumab, Racotumomab, Radretumab, Rafivirumab, Ralpancizumab, Ramucirumab, Ranibizumab, Raxibacumab, Refanezumab, Regavirumab, Reslizumab, Rilotumumab, Rinucumab, Rituximab, Robatumumab, Roledumab, Romosozumab, Rontalizumab, Rovelizumab, Ruplizumab, Sacituzumab govitecan, Samalizumab, Sarilumab, Satumomab pendetide, Secukinumab, Seribantumab, Setoxaximab, Sevirumab, SGN-CD19A, SGN-CD33A, Sibrotuzumab, Sifalimumab, Siltuximab, Simtuzumab, Siplizumab, Sirukumab, Sofituzumab vedotin, Solanezumab, Solitomab, Sonepcizumab, Sontuzumab, Stamulumab, Sulesomab, Suvizumab, Tabalumab, Tacatuzumab tetraxetan, Tadocizumab, Talizumab, Tanezumab, Taplitumomab paptox, Tarextumab, Tefibazumab, Telimomab aritox, Tenatumomab, Teneliximab, Teplizumab, Teprotumumab, Tesidolumab, TGN1412, Ticilimumab, Tigatuzumab, Tildrakizumab, TNX-650, Tocilizumab, Toralizumab, Tosatoxumab, Tositumomab, Tovetumab, Tralokinumab, Trastuzumab, TRBS07, Tregalizumab, Tremelimumab, Trevogrumab, Tucotuzumab celmoleukin, Tuvirumab, Ublituximab, Ulocuplumab, Urelumab, Urtoxazumab, Ustekinumab, Vandortuzumab vedotin, Vantictumab, Vanucizumab, Vapaliximab, Varlilumab, Vatelizumab, Vedolizumab, Veltuzumab, Vepalimomab, Vesencumab, Visilizumab, Volociximab, Vorsetuzumab mafodotin, Votumumab, Zalutumumab, Zanolimumab, Zatuximab, Ziralimumab, or Zolimomab aritox.

[0652] In certain embodiments, said antibody:cyclic GFR-binding compound complex is a covalent complex. In certain embodiments, said antibody:cyclic GFR-binding compound complex is a non-covalent complex.

### IX. Dendrimer:Cyclic GFR-Binding Compound Complex

[0653] In one aspect, the present disclosure provides a dendrimer:cyclic GFR-binding compound complex comprising at least one (modified) cyclic GFR-binding compound and at least one dendrimer or any functional fragment thereof; wherein said (modified) cyclic GFR-binding compound is as defined herein; and wherein said dendrimer is as already defined herein.

[0654] In certain embodiments, said dendrimer:cyclic GFR-binding compound complex is a covalent complex. In certain embodiments, said dendrimer:cyclic GFR-binding compound complex is a non-covalent complex.

### X. Polynucleotides

[0655] The extracellular biological action of the cyclic GFR-binding peptides may also be conveyed via expression, by a cell, of the appropriate polynucleotide sequence engineered to encode a particular non-cyclic, cyclizable-GFR-binding peptide having the same sequence as the cyclic GFR-binding peptide of interest and having the relevant N- and C-terminal modifications so that, once expressed by the cell, the non-cyclic sequence is able to appropriately cyclize to form, in-situ, the desired cyclic GFR-binding peptide. One example of such N- and C-terminal modifications is the sulfide modification in which the polynucleotide sequence encoding the peptide sequence of interest also contains, as part of its coding region, nucleotides encoding for an N-terminal cysteine and a C-terminal cysteine, so that the peptide sequence is expressed with two termini cysteines capable of forming, under appropriate conditions, a disulfide bond (S—S) resulting in the formation of a cyclic GFR-binding peptide. One may thus inject or administer, to a mammal subject, a cyclizable-GFR-binding-peptide-encoding polynucleotide (such as a messenger RNA), wherein said polynucleotide would enable the intracellular production of the encoded cyclizable GFR-binding peptide, which may, after cyclization and once released outside the host cell, exert its extracellular action on the host cell and/or on neighbouring cells and/or distant cells. In other words, GFR-binding peptides may be produced ex-vivo (e.g. using a peptide synthesizer) or in-vivo (e.g. via cell expression of a cyclizable GFR-binding-peptide-encoding polynucleotide), and in all cases have an extracellular biological action of activation of growth factor receptors to induce cell differentiation and/or tissue regeneration.

[0656] Thus, in one aspect, the present disclosure provides a polynucleotide encoding at least one peptide as disclosed herein together with the appropriate termini modifications as described above. In one particular example, said polynucleotide is a messenger RNA or a primary construct thereof. Said messenger RNA may additionally have a 5′ cap structure chosen from the group consisting of m7G(5′)ppp (5′)A,G(5′)ppp(5′)A and G(5′)ppp(5′)G. In one example, the messenger RNA additionally has a poly-A tail of from about 10 to 200 adenosine nucleotides. In one example, the messenger RNA additionally has a poly-C tail of from about 10 to 200 cytosine nucleotides. In one example, the messenger RNA additionally codes a tag for purification chosen from the group consisting of a hexahistidine tag (HIS tag, polyhistidine tag), a streptavidin tag (Strep tag), an SBP tag (streptavidin-binding tag) or a GST (glutathione S-transferase) tag, or codes for a tag for purification via an antibody epitope chosen from the group consisting of antibody-binding tags, a Myc tag, a Swal 1 epitope, a FLAG tag or an HA tag. In one example, the messenger RNA additionally codes a signal peptide and/or a localization sequence, in particular a secretion sequence. In one example, said polynucleotide is a complementary DNA of said messenger RNA or a primary construct thereof.

[0657] In one aspect, the present disclosure also provides a vector comprising a polynucleotide as defined in the present disclosure.

[0658] In one aspect, the present disclosure also provides a cultured cell comprising a vector as defined in the present disclosure.

[0659] In one aspect, the present disclosure also provides a method of expressing a peptide of interest, variant or analog thereof, in a mammalian cell, said method comprising: (i) providing an mRNA as defined in the present disclosure; and (ii) introducing said mRNA to a mammalian cell under conditions that permit the expression of the peptide of interest by the mammalian cell.

[0660] In one aspect, the present disclosure also provides a mRNA as disclosed herein for use in a medical treatment or prophylactic method. In one example, said medical treatment method is a therapeutic, surgical, or diagnostic method. In one particular example, said method is a method for treating or preventing cell-degeneration-associated diseases, disorders, conditions, or pathologies as defined in the present disclosure. In one particular example, said method is a method for regenerating mammalian tissues as disclosed herein.

[0661] In one aspect, the present disclosure also provides a use of a RNA or mRNA as defined in the present disclosure for the preparation of a pharmaceutical composition for the treatment or prevention of cell-degeneration-associated diseases, disorders, conditions, or pathologies as disclosed herein.

[0662] In one aspect, the present disclosure also provides a medical composition comprising a polynucleotide, a vector, or a transfected cell, all as defined in the present disclosure, and a medically acceptable excipient or carrier.

[0663] Expression: As used herein, “expression” of a nucleic acid sequence refers to one or more of the following events: (1) production of an RNA template from a DNA sequence (e.g., by transcription); (2) processing of an RNA transcript (e.g., by splicing, editing, 5′ cap formation, and/or 3′ end processing); (3) translation of an RNA into a polypeptide or protein; and (4) post-translational modification of a polypeptide or protein.

[0664] mRNA: As used herein, the term “mRNA” refers to messenger RNA. Traditionally, the basic components of an mRNA molecule include at least a coding region, a 5′UTR, a 3′UTR, a 5′cap and a poly-A tail. Whereas the 5′UTR, 3′UTR, 5′cap and the poly-A tail are usually required to improve e.g. stability, translation and/or recognition by the ribosome, it is the coding region which comprises the sequence encoding the protein(s), polypeptide(s), or peptide(s) of (therapeutic) interest. Therefore, when the mRNA molecule as disclosed herein is conventionally described with reference to its coding region, any mRNA molecule also comprising at least one of a 5′UTR, a 3′UTR, a 5′cap or a poly-A tail forms an integral part of the present disclosure.

[0665] Coding region: As used herein, the term “coding region” or “coding sequence” refers to a portion of a polynucleotide that codes for a peptide or peptides of interest.

[0666] Primary RNA construct or transcript: As used herein, unless indicated otherwise or contradictory in context, the term “Primary RNA construct” or “Primary RNA transcript” refers to any precursor RNA molecule from a mature and functional (i.e. translatable) RNA molecule may be obtained. For instance, a precursor messenger RNA (pre-mRNA) is a type of primary transcript that becomes a messenger RNA (mRNA) after processing. Newly synthesized primary transcripts are modified in several ways to yield their mature form before they can be translated into a protein of interest. Such modifications include, but are not limited to, excision of introns, splicing of exons, addition of 5′cap and poly-A tail. Therefore, when reference is made to an RNA molecule, it shall be understood that it aims to cover all RNA molecules including, but not limited to, primary RNA transcripts or constructs at any stage of the modification process leading to a mature and functional RNA molecule e.g. with or without introns, exons, 5′cap, poly-A tail and/or any other conventional modifications, insofar as the RNA molecule contains a coding region or a precursor thereof allowing for a peptide of interest encoded by said coding region or precursor thereof to be expressed.

[0667] 5′ Capping: As used herein, unless indicated otherwise or contradictory in context, the term “5′ Capping” ou “5′ Cap” refers to a 5′ cap structure of a mRNA that is involved in nuclear export, increasing mRNA stability and binds the mRNA Cap Binding Protein (CBP), which is responsible for mRNA stability in the cell and translation competency through the association of CBP with poly(A) binding protein to form the mature cyclic mRNA species. The cap further assists the removal of 5′ proximal introns removal during mRNA splicing. Endogenous mRNA molecules may be 5 ‘-end capped generating a 5’-ppp-5′-triphosphate linkage between a terminal guanosine cap residue and the 5 ‘-terminal transcribed sense nucleotide of the mRNA molecule. This 5’-guanylate cap may then be methylated to generate an N7-methyl-guanylate residue.

[0668] Poly-A tails: During RNA processing, a long chain of adenine nucleotides (poly-A tail) may be added to a polynucleotide such as an mRNA molecules in order to increase stability. Immediately after transcription, the 3′ end of the transcript may be cleaved to free a 3′ hydroxyl. Then poly-A polymerase adds a chain of adenine nucleotides to the RNA. The process, called polyadenylation, adds a poly-A tail that can be between, for example, approximately 100 and 250 residues long.

[0669] Untranslated regions: As used herein, the term “Untranslated regions” or UTRs of a gene refers to regions that are transcribed but not translated. The 5′UTR starts at the transcription start site and continues to the start codon but does not include the start codon; whereas, the 3′UTR starts immediately following the stop codon and continues until the transcriptional termination signal. The regulatory features of a UTR can be incorporated into the polynucleotides, primary constructs and/or mRNA of the present disclosure to enhance the stability of the molecule.

[0670] 3′UTR: As used herein, unless indicated otherwise or contradictory in context, the term “3′UTR” or “three prime untranslated region” refers to the section of messenger RNA that immediately follows the translation termination codon. The 3′-UTR often contains regulatory regions that post-transcriptionally influence gene expression.

[0671] 5′UTR: As used herein, unless indicated otherwise or contradictory in context, the term “5′UTR” or “five prime untranslated region” refers to the section of mRNA that starts at the transcription start site and continues to the start codon but does not include the start codon. There is growing body of evidence about the regulatory roles played by the UTRs in terms of stability of the nucleic acid molecule and translation. Natural 5′UTRs bear features which play roles in for translation initiation. 5′UTR also have been known to form secondary structures which are involved in elongation factor binding.

[0672] Complementary DNA: As used herein, the term “complementary DNA” or “cDNA” refers to a DNA molecule containing an eukaryote gene which has been tailored or engineered to be expressed in a prokaryote host cell. cDNA is also called “intron-free” DNA as it lacks the gene regions encoding introns, its transcription yielding an intron-free mRNA molecule.

[0673] In one aspect, the present disclosure provides a vector comprising a polynucleotide encoding at least one peptide, variant or analog thereof, having growth factor receptor-binding capability or capabilities, as defined herein.

[0674] Vector: As used herein, unless indicated otherwise or contradictory in context, the term “vector” is used in its most general meaning and refers to any intermediary vehicle for a nucleic acid which enables said nucleic acid, for example, to be introduced into prokaryotic and/or eukaryotic cells and, where appropriate, to be integrated into a genome. Vectors of this kind are preferably replicated and/or expressed in the cells. Vectors may comprise plasmids, phagemids, bacteriophages or viral genomes.

[0675] Plasmid: As used herein, unless indicated otherwise or contradictory in context, the term “plasmid” refers to a double-stranded (which may be circular) DNA sequence that is capable of automatically replicating in a host cell.

[0676] In one aspect, the present disclosure provides a cultured cell (or transfected cell) comprising a polynucleotide encoding at least one peptide, variant or analog thereof, having growth factor receptor-binding capability or capabilities, as defined herein.

[0677] In one aspect, the present disclosure provides a medical composition comprising at least one of a polynucleotide encoding at least one peptide, variant or analog thereof, having growth factor receptor-binding capability or capabilities, as defined herein, a vector comprising such a polynucleotide, or a transfected cell comprising such a vector, and a medically acceptable carrier.

[0678] In one aspect, the present disclosure provides methods and uses for inducing cell differentiation, regenerating tissues and protecting a patient from cell-degeneration-related diseases, conditions, disorders or pathologies, using at least one of a polynucleotide encoding at least one peptide, variant or analog thereof, having growth factor receptor-binding capability or capabilities, as defined herein, a vector comprising such a polynucleotide, a transfected cell comprising such a vector, or a medical composition comprising them.

### XI. Pharmaceutical Compositions

[0679] The present disclosure provides cyclic GFR-binding compounds, modified cyclic GFR-binding compounds and functionalised bioactive carrier, which may be used for inducing stem cell differentiation and tissue regeneration.

[0680] In one aspect, the present disclosure provides a composition such as a pharmaceutical, prophylactic, surgical, diagnostic, or imaging composition (hereinafter shorten as pharmaceutical or medical composition) comprising at least one (modified) cyclic GFR-binding compound or a functionalised bioactive carrier as defined herein and further comprising at least one pharmaceutically acceptable excipient carriers and/or vehicles.

[0681] Formulations of the pharmaceutical compositions described herein may be prepared by any method known or hereafter developed in the art of pharmacology. Generally, such methods of preparation include the step of bringing the active ingredient(s) into association with an excipient and/or one or more other accessory ingredients, and then, if necessary and/or desirable, shaping and/or packaging the product into a desired single- or multi-dose unit.

[0682] For example, in certain embodiments, a pharmaceutical composition as defined herein may contain between 0.01% and 100% by weight (over the total weight of the pharmaceutical composition) of a (modified) cyclic GFR-binding compound or a functionalised bioactive carrier, both as defined herein, as a pharmaceutically effective amount. The pharmaceutical composition particularly comprises between 0.01% and 95%, between 0.01% and 90%, between 0.01% and 85%, between 0.01% and 80%, between 0.01% and 75%, between 0.01% and 70%, between 0.01% and 65%, between 0.01% and 60%, between 0.01% and 55%, between 0.01% and 50%, between 0.01% and 45%, between 0.01% and 40%, between 0.01% and 35%, between 0.01% and 30%, between 0.01% and 25%, between 0.01% and 20%, between 0.01% and 15%, between 0.01% and 10%, between 0.01% and 5%, between 0.1% and 100%, between 0.1% and 95%, between 0.1% and 90%, between 0.1% and 85%, between 0.1% and 80%, between 0.1% and 75%, between 0.1% and 70%, between 0.1% and 65%, between 0.1% and 60%, between 0.1% and 55%, between 0.1% and 50%, between 0.1% and 45%, between 0.1% and 40%, between 0.1% and 35%, between 0.1% and 30%, between 0.1% and 25%, between 0.1% and 20%, between 0.1% and 15%, between 0.1% and 10%, and between 0.1% and 5% by weight (over the total weight of the pharmaceutical composition) of any one of a (modified) cyclic GFR-binding compound or a functionalised bioactive carrier as defined herein.

[0683] Generally, the (modified) cyclic GFR-binding compounds or functionalised bioactive carriers as defined herein may thus be administered as such or as part of a formulation in association with one or more pharmaceutically acceptable excipients, carriers and/or vehicles so as to form what is generally referred to as a pharmaceutical composition or pharmaceutical formulation.

[0684] Pharmaceutical effective amount: As used herein, unless indicated otherwise or contradictory in context, the term “pharmaceutical effective amount” or “therapeutically effective amount” refers to an amount of an agent to be delivered (e.g., nucleic acid, protein, peptide, drug, therapeutic agent, diagnostic agent, prophylactic agent, etc.) that is sufficient, when administered to a subject suffering from or susceptible to an infection, disease, disorder, condition and/or pathology, to produce/provide a therapeutically effective outcome. Thus, a “pharmaceutical effective amount” depends upon the context in which it is being applied. A pharmaceutical effective amount of a composition is provided based, at least in part, on the target tissue, target cell type, means of administration, physical characteristics of the pharmaceutical association or composition (e.g., size, 3D shape, etc.), and other determinants. For example, in certain embodiments, in the context of providing an agent that induces tissue regeneration, a pharmaceutical effective amount of an agent is, for example, in certain embodiments, an amount sufficient to achieve tissue regeneration, as compared to the response obtained without provision of the agent. For example, in certain embodiments, a therapeutically effective amount as used herein is any of the herein disclosed weight or molar amounts, ratios or ranges of the (modified) cyclic GFR-binding compound or functionalised bioactive carrier.

[0685] Therapeutically effective outcome: As used herein, unless indicated otherwise or contradictory in context, the term “therapeutically effective outcome” refers to an outcome that is sufficient in a subject suffering from or susceptible to an infection, disease, disorder, condition and/or pathology, to treat, improve symptoms of, diagnose, prevent, and/or delay the onset of the infection, disease, disorder, condition and/or pathology.

[0686] Therapeutic Agent: As used herein, unless indicated otherwise or contradictory in context, the term “therapeutic agent” refers to any agent that, when administered to a subject/patient/individual, has a therapeutic, diagnostic, and/or prophylactic effect and/or elicits a desired biological and/or pharmacological effect.

[0687] Pharmaceutically acceptable: As used herein, unless indicated otherwise or contradictory in context, the term “pharmaceutically acceptable” refers to those compounds, materials, compositions, and/or dosage forms which are, within the ambit of sound medical judgment, suitable for use in contact with the tissues of human beings and animals without excessive toxicity, irritation, allergic response, or other problem or complication, commensurate with a reasonable benefit/risk ratio.

[0688] Pharmaceutically acceptable excipients: As used herein, unless indicated otherwise or contradictory in context, the term “pharmaceutically acceptable excipient” refers to any ingredient other than the compounds described herein (i.e. cyclic GFR-binding compounds, bioactive carriers as defined herein or any further active principles) and satisfying to the herein defined definition of pharmaceutically acceptable for a patient. Excipients may include, for example: inert diluents, dispersing and/or granulating agents, surface active agents and/or emulsifiers, disintegrating agents, binding agents, preservatives, buffering agents, lubricating agents, oils, printing inks, sweeteners, and/or waters of hydration. The choice of excipient(s) will largely depend on factors such as the particular mode of administration, the effect of the excipient(s) on solubility and stability, and the nature of the dosage form. In one embodiment, the pharmaceutically acceptable excipient is not a naturally occurring excipient.

[0689] Diluents: As used herein, unless indicated otherwise or contradictory in context, diluents include, but are not limited to, calcium carbonate, sodium carbonate, calcium phosphate, dicalcium phosphate, calcium sulfate, calcium hydrogen phosphate, sodium phosphate lactose, sucrose, cellulose, microcrystalline cellulose, kaolin, mannitol, sorbitol, inositol, sodium chloride, dry starch, powdered sugar and/or any combinations thereof.

[0690] Buffering agents: As used herein, unless indicated otherwise or contradictory in context, buffering agents include, but are not limited to, citrate buffer solutions, acetate buffer solutions, phosphate buffer solutions, ammonium chloride, potassium acetate, potassium chloride, monobasic potassium phosphate, calcium carbonate, calcium chloride, calcium citrate, calcium gluconate, calcium lactate, propanoic acid, calcium levulinate, pentanoic acid, phosphoric acid, calcium hydroxide phosphate, sodium acetate, sodium bicarbonate, sodium chloride, sodium citrate, sodium lactate, magnesium hydroxide, aluminum hydroxide, alginic acid, pyrogen-free water, isotonic saline, Ringer's solution, ethyl alcohol and any combinations thereof.

[0691] Granulating and/or dispersing agents: As used herein, unless indicated otherwise or contradictory in context, granulating and/or dispersing agents include, but are not limited to, potato starch, corn starch, tapioca starch, sodium starch glycolate, clays, alginic acid, guar gum, citrus pulp, agar, bentonite, cellulose and wood products, natural sponge, cation-exchange resins, calcium carbonate, silicates, sodium carbonate, cross-linked poly(vinyl-pyrrolidone), sodium carboxymethyl starch, carboxymethyl cellulose, cross-linked sodium carboxymethyl cellulose, methylcellulose, pregelatinized starch, microcrystalline starch, water insoluble starch, calcium carboxymethyl cellulose, magnesium aluminum silicate, sodium lauryl sulfate, quaternary ammonium compounds and/or any combinations thereof.

[0692] Surface active agents and/or emulsifiers: As used herein, unless indicated otherwise or contradictory in context, surface active agents and/or emulsifiers include, but are not limited to, colloidal clays (such as aluminum silicates and magnesium aluminum silicates), natural emulsifiers (such as acacia, agar, sodium alginate, cholesterol, xanthan, pectin, gelatin, egg yolk, casein, cholesterol, wax, and lecithin), long chain amino acid derivatives, high molecular weight alcohols (such as stearyl, cetyl and oleyl alcohols, triacetin monostearate, ethylene glycol distearate and glyceryl monostearate), carbomers (such as carboxy polymethylene, polyacrylic acid, acrylic acid polymer, and carboxyvinyl polymer), diethylene glycol monolaurate, triethanolamine oleate, sodium oleate, potassium oleate, ethyl oleate, oleic acid, ethyl laurate, sodium lauryl sulfate, cetrimonium bromide, cetylpyridinium chloride, benzalkonium chloride, docusate sodium, carrageenan, cellulosic derivatives (such as carboxymethylcellulose sodium, hydroxymethyl cellulose, hydroxypropyl methylcellulose and methylcellulose), sorbitan fatty acid esters (such as polyoxyethylene sorbitan monolaurate, polyoxyethylene sorbitan, polyoxyethylene sorbitan monooleate, sorbitan monopalmitate and glyceryl monooleate), polyoxyethylene esters, sucrose fatty acid esters, polyethylene glycol fatty acid esters, polyoxyethylene ethers, poly(vinyl-pyrrolidone), and any combinations thereof.

[0693] Binding agents: As used herein, unless indicated otherwise or contradictory in context, binding agents include, but are not limited to, natural and synthetic gums (such as acacia, sodium alginate, carboxymethylcellulose, methylcellulose, ethylcellulose, hydroxyethylcellulose, hydroxypropyl cellulose, hydroxypropyl methylcellulose, microcrystalline cellulose, cellulose acetate and poly(vinyl-pyrrolidone), gelatin, starch, sugars (such as sucrose, dextrose, glucose, dextrin, lactose, and mannitol), alignates, magnesium aluminum silicates, polyethylene glycol, polyethylene oxide, inorganic calcium salts, water, alcohol, silicic acid, waxes, and any combinations thereof.

[0694] Preservatives: As used herein, unless indicated otherwise or contradictory in context, preservatives include, but are not limited to, antioxidants, chelating agents, antifungal preservatives, antimicrobial preservatives, acidic preservatives, and alcohol preservatives.

[0695] Antioxidants: As used herein, unless indicated otherwise or contradictory in context, antioxidants include, but are not limited to, alpha tocopherol, ascorbic acid, acorbyl palmitate, butylated hydroxyanisole, propionic acid, potassium metabisulfite, propyl gallate, sodium metabisulfite, sodium ascorbate, and sodium sulfite.

[0696] Chelating agents: As used herein, unless indicated otherwise or contradictory in context, chelating agents include ethylenediaminetetraacetic acid (EDTA), fumaric acid, malic acid, phosphoric acid, citric acid monohydrate and tartaric acid.

[0697] Antimicrobial preservatives: As used herein, unless indicated otherwise or contradictory in context, antimicrobial preservatives include, but are not limited to, benzalkonium chloride, benzethonium chloride, chlorhexidine, chlorobutanol, chlorocresol, chloroxylenol, benzyl alcohol, bronopol, cetylpyridinium chloride, cresol, ethyl alcohol, glycerin, hexetidine, imidurea, phenoxyethanol, phenylmercuric nitrate, phenylethyl alcohol, phenol, and propylene glycol.

[0698] Antifungal preservatives: As used herein, unless indicated otherwise or contradictory in context, antifungal preservatives include, but are not limited to, benzoic acid, hydroxybenzoic acid, butyl paraben, methyl paraben, ethyl paraben, propyl paraben, potassium benzoate, sodium propionate, potassium sorbate, and/or sorbic acid.

[0699] Alcohol preservatives: As used herein, unless indicated otherwise or contradictory in context, alcohol preservatives include, but are not limited to, phenol, phenolic compounds, bisphenol, ethanol, polyethylene glycol, chlorobutanol and hydroxybenzoate.

[0700] Acidic preservatives: As used herein, unless indicated otherwise or contradictory in context, acidic preservatives include, but are not limited to, vitamin A, vitamin C, vitamin E, beta-carotene, acetic acid, citric acid, dehydroacetic acid, and sorbic acid.

[0701] Lubricating agents: As used herein, unless indicated otherwise or contradictory in context, lubricating agents include, but are not limited to, magnesium stearate, calcium stearate, stearic acid, sodium benzoate, sodium acetate, sodium chloride, silica, talc, malt, glyceryl behanate, hydrogenated vegetable oils, polyethylene glycol, magnesium lauryl sulphate and any combinations thereof.

[0702] Sweeteners: As used herein, unless indicated otherwise or contradictory in context, sweeteners include, but are not limited to, any natural or synthetic sugar substitutes. Natural sugar substitutes include, but are not limited to, brazzein, curculin, erythritol, glycyrrhizin, glycerol, hydrogenated starch hydrolysates, inulin, isomalt, lactitol, mogroside mix, mabinlin, maltitol, malto-oligosaccharide, mannitol, miraculin, monatin, monellin, osladin, pentadin, sorbitol, stevia, tagatose, thaumatin, and xylitol. Synthetic sugar substitutes include, but are not limited to, acesulfame potassium, advantame, alitame, aspartame, salt of aspartame-acesulfame, sodium cyclamate, dulcin, glucin, neohesperidin dihydrochalcone, neotame, P-4000, saccharin, Sucralose.

[0703] Exemplary excipients include, but are not limited to: butylated hydroxytoluene (BHT), calcium carbonate, calcium phosphate (dibasic), calcium stearate, croscarmellose, crosslinked polyvinyl pyrrolidone, citric acid, crospovidone, cysteine, ethylcellulose, gelatin, hydroxypropyl cellulose, hydroxypropyl methylcellulose, lactose, magnesium stearate, maltitol, mannitol, methionine, methylcellulose, methyl paraben, microcrystalline cellulose, polyethylene glycol, polyvinyl pyrrolidone, povidone, pregelatinized starch, propyl paraben, retinyl palmitate, shellac, silicon dioxide, sodium carboxymethyl cellulose, sodium citrate, sodium starch glycolate, sorbitol, starch, stearic acid, sucrose, talc, titanium dioxide, vitamin A, vitamin E, vitamin C, and xylitol. Suitable excipients for use in the present invention also include, but are not limited to, water, phosphate buffered saline (PBS), Ringer's solution, dextrose solution, serum-containing solutions, Hank's solution, other aqueous physiologically balanced solutions, oils, esters and glycols. Aqueous excipients can contain suitable auxiliary substances required to approximate the physiological conditions of the recipient, for example, in certain embodiments, by enhancing chemical stability and isotonicity.

[0704] Pharmaceutically acceptable carriers: As used herein, unless indicated otherwise or contradictory in context, the term “pharmaceutically acceptable carriers” or “carriers” refers to pharmaceutically acceptable excipients and/or delivery vehicles suitable for delivering a pharmaceutical or therapeutic composition useful in a therapeutic method and uses of the present invention to a suitable in-vivo or ex-vivo site. Preferred pharmaceutically acceptable carriers are capable of maintaining a composition containing an active combination or association of a (modified) cyclic GFR-binding compound and a bioactive carrier as defined herein, in a form that, upon arrival of the combination to a target cell, site or tissue, the active combination is capable of performing one or more biological functions thereof the protein at the cell or tissue site. One type of pharmaceutically acceptable carrier includes a controlled release formulation that is capable of slowly releasing a composition or combination into an animal. In one example, a controlled release formulation comprises an active combination or association as defined herein in a controlled release vehicle. Suitable controlled release vehicles include, but are not limited to, microparticles, biocompatible polymers, other polymeric matrices, capsules, microcapsules, osmotic pumps, bolus preparations, diffusion devices, liposomes, lipospheres, and transdermal delivery systems. Such suitable controlled release vehicle may be combined with at least one targeting moiety. In one embodiment, the pharmaceutically acceptable carrier is not a naturally occurring carrier.

[0705] Targeting Moieties: In one example, the functionalised bioactive carrier disclosed herein includes at least one binding partner which functions to target the cell to a specific tissue space or to interact with a specific moiety, either in-vivo, ex-vivo or in-vitro. Suitable binding partners include antibodies and functional fragments thereof, scaffold proteins, or peptides.

[0706] In one example, said excipients, carriers or vehicles are compatible with the (modified) cyclic GFR-binding compounds or functionalised bioactive carriers defined herein so that they do not disrupt, tamper, modify, de-organise, de-combine or de-associate said the (modified) cyclic GFR-binding compounds or functionalised bioactive carriers. In contrast, said excipients, carriers or vehicles preserves, maintains or reinforces the stability of the (modified) cyclic GFR-binding compounds or functionalised bioactive carriers so as to preserve their biological activity.

[0707] In one example, the present pharmaceutical compositions also include pharmaceutically acceptable salts and/or solvates and/or prodrugs and/or isotopically-labelled derivatives of the substances and compounds described herein such as the (modified) cyclic GFR-binding compounds or any other active principles.

[0708] Pharmaceutically acceptable salts: As used herein, unless indicated otherwise or contradictory in context, the term “pharmaceutically acceptable salts” refers to derivatives of the disclosed substances and compounds wherein the parent substance or compound is modified by converting an existing acid or base moiety to its salt form (e.g., by reacting the free base group with a suitable organic acid). The degree of ionization in the salt may vary from completely ionized to almost non-ionized. Examples of pharmaceutically acceptable salts include, but are not limited to, mineral or organic acid salts of basic residues such as amines; alkali or organic salts of acidic residues such as carboxylic acids; and the like. Representative acid addition salts include acetate, adipate, alginate, ascorbate, aspartate, benzenesulfonate, benzoate, bisulfate, borate, butyrate, camphorate, camphorsulfonate, citrate, cyclopentanepropionate, digluconate, dodecylsulfate, ethanesulfonate, fumarate, glucoheptonate, glycerophosphate, hemisulfate, heptonate, hexanoate, hydrobromide, hydrochloride, hydroiodide, 2-hydroxy-ethanesulfonate, lactobionate, lactate, laurate, lauryl sulfate, malate, maleate, malonate, methanesulfonate, 2-naphthalenesulfonate, nicotinate, nitrate, oleate, oxalate, palmitate, pamoate, pectinate, persulfate, 3-phenylpropionate, phosphate, picrate, pivalate, propionate, stearate, succinate, sulfate, tartrate, thiocyanate, toluenesulfonate, undecanoate, valerate salts, and the like. Representative alkali or alkaline earth metal salts include sodium, lithium, potassium, calcium, magnesium, and the like, as well as nontoxic ammonium, quaternary ammonium, and amine cations, including, but not limited to ammonium, tetramethylammonium, tetraethylammonium, methylamine, dimethylamine, trimethylamine, triethylamine, ethylamine, and the like. The pharmaceutically acceptable salts of the present disclosure include the conventional non-toxic salts of the parent compound formed, for example, in certain embodiments, from non-toxic inorganic or organic acids. The pharmaceutically acceptable salts of the present disclosure can be synthesized from the parent compound which contains a basic or acidic moiety by conventional chemical methods. Generally, such salts can be prepared by reacting the free acid or base forms of these compounds with a stoichiometric amount of the appropriate base or acid in water or in an organic solvent, or in a mixture of the two; generally, non-aqueous media like ether, ethyl acetate, ethanol, isopropanol, or acetonitrile are preferred. Lists of suitable salts are generally found in Remington's Pharmaceutical Sciences, 17th ed., Mack Publishing Company, Easton, Pa., 1985, p. 1418 and in Pharmaceutical Salts: Properties, Selection, and Use, P. H. Stahl and C. G. Wermuth (eds.), Wiley-VCH, 2008, each of which being incorporated herein by reference in its entirety. In one embodiment, the pharmaceutically acceptable salt is not a naturally occurring salt.

[0709] Pharmaceutically acceptable solvate: As used herein, unless indicated otherwise or contradictory in context, the term “pharmaceutically acceptable solvate,” refers to a compound, substance, association or combination wherein molecules of a suitable solvent are incorporated in the crystal lattice. A suitable solvent is physiologically tolerable at the dosage administered. For example, in certain embodiments, solvates may be prepared by crystallization, recrystallization, or precipitation from a solution that includes organic solvents, water, or a mixture thereof. Examples of suitable solvents are ethanol, water (For example, in certain embodiments, mono-, di-, and tri-hydrates), N-methylpyrrolidinone (NMP), dimethyl sulfoxide (DMSO), dimethylformamide (DMF), [Nu],[Nu]′-dimethylacetamide (DMAC), 1,3-dimethyl-2-imidazolidinone (DMEU), 1,3-dimethyl-3,4,5,6-tetrahydro-2-(1H)-pyrimidinone (DMPU), acetonitrile (ACN), propylene glycol, ethyl acetate, benzyl alcohol, 2-pyrrolidone, benzyl benzoate, and the like. When water is the solvent, the solvate is referred to as a “hydrate”. In one embodiment, the pharmaceutically acceptable solvate is not a naturally occurring solvate.

[0710] Pharmaceutically acceptable isotopically-labelled compounds: In one example, the present invention also includes all pharmaceutically acceptable isotopically-labelled derivatives, which are identical to the compounds, substances, combinations or associations described herein but wherein one or more atoms are replaced by atoms having an atomic mass or mass number different from the atomic mass or mass number usually found in nature. Examples of isotopes that may be incorporated into cyclic GFR-binding compound(s) as defined herein include isotopes of hydrogen, carbon, chlorine, fluorine, iodine, nitrogen, oxygen, and sulfur, such as ²H, ³H, ¹¹C, ¹³C, ¹⁴C, ³⁶Cl, ¹⁸F, ¹²³I, ¹³N, ¹⁵N, ¹⁷O, and ³⁵S, respectively. It should be understood that compounds, substances, combinations, associations, prodrugs, and pharmaceutical acceptable salts thereof described herein which contain the aforementioned isotopes and/or other isotopes of other atoms are within the scope of the invention. Certain isotopically labeled of the compounds, substances, combinations, associations, prodrugs, and salts thereof such as, for example, in certain embodiments, those incorporating a radioactive isotope such as ³H and ¹⁴C, are useful in drug and/or substrate tissue distribution studies. Tritium, i.e. ³H, and carbon-14, i.e. ¹⁴C, are particularly preferred due to their ease of preparation and detection. Further, substitution with heavier isotopes such as deuterium, i.e. ²H, can afford certain therapeutic advantages resulting from greater metabolic stability, for example, in certain embodiments, increased in vivo half-life or reduced dosage requirements, and hence may be preferred in some circumstances. Isotopically labeled compounds, substances, combinations, associations, prodrugs, and salts thereof can generally be prepared by carrying out the procedures disclosed in the Schemes and/or in the Examples by substituting a readily available non-isotopically labeled reagent for an isotopically labeled reagent.

[0711] Prodrugs: As used herein, unless indicated otherwise or contradictory in context, the term “prodrug” refers to a compound, substance, combination or association that is transformed in vivo to yield a compound, substance, combination or association as defined herein or a pharmaceutically acceptable salt or solvate thereof. The transformation may occur by various mechanisms, such as via hydrolysis in blood. A prodrug of a compound, substance, combination or association defined herein may be formed in a conventional manner with one or more functional groups in the compound, such as an amino, hydroxyl or carboxyl group. For example, in certain embodiments, if a compound defined herein contains a carboxylic acid functional group, a prodrug can comprise: (1) an ester formed by the replacement of a hydrogen of the acid group with a group such as (C1-C6)alkyl or (C6-C10) aryl; (2) an activated ester formed by the replacement of the hydrogen of the acid group with groups such as —(CR²)COOR′, where CR² is a spacer and R can be groups such as H or methyl and R′ can be groups such as (C1-C6)alkyl or (C6-C10) aryl; and/or (3) a carbonate formed by the replacement of the hydrogen of the acid with groups such as CHROCOOR′ where R can be groups such as H or methyl and R′ can be groups such as (C1-C6)alkyl or (C6-C10)aryl. Similarly, if a compound defined herein contains an alcohol functional group, a prodrug can be formed via the replacement of the hydrogen of the alcohol with groups such as (C1-C6)alkanoyloxymethyl or (C1-C6)alkanoyloxyaryl or by forming an ester via condensation with, for example, in certain embodiments, an amino acid. Where a compound defined herein contains a primary or secondary amino group, a prodrug may comprise, for example, in certain embodiments, an amide formed by the replacement of one or both of the hydrogen atoms of the amino group with (C1-C10)alkanoyl or (C6-C10)aroyl. Other prodrugs of amines are well known to those skilled in the art. Alternatively, certain compounds defined herein may themselves act as prodrugs of other compounds defined herein. Discussions regarding prodrugs and their use can be found in, for example, in certain embodiments, “Prodrugs as Novel Delivery Systems,” T. Higuchi and W. Stella, Vol. 14 of the ACS Symposium Series, and Bioreversible Carriers in Drug Design, Pergamon Press, 1987 (ed. E B Roche, American Pharmaceutical Association). Examples of other prodrug types may be found in the aforementioned reference which is hereby incorporated by reference.

### XII. Administration Routes and Procedures

[0712] (Modified) cyclic GFR-binding compounds, substances, functionalised bioactive carrier to be delivered and/or pharmaceutical, dermatological, prophylactic, diagnostic, or imaging compositions or formulations thereof in accordance with the present disclosure may be administered by any route of administration effective for preventing, treating, diagnosing, or imaging a disease, disorder, or condition and/or treating or alleviating at least one symptoms thereof and/or inducing tissue formation/regeneration and/or reducing or preventing tissue degeneration.

[0713] Suitable administration protocols include any in-vitro, in-vivo or ex-vivo administration protocol. The preferred types and routes of administration will be apparent to those of skill in the art, depending on the type of condition or disease to be prevented or treated or the nature of tissue to regenerate; whether the composition is nucleic acid based, protein based, cell based or combinations or mixtures thereof; and/or the target cell/tissue.

[0714] Ex-vivo and in-vitro administration: As used herein, unless indicated otherwise or contradictory in context, the term “ex-vivo administration” refers to performing the regulatory step outside of the subject/patient, such as administering a (modified) cyclic GFR-binding compounds, functionalised bioactive carrier or medical compositions as defined herein to a population of cells (e.g., mesenchymal stem cells) removed from a subject/patient for e.g. diagnostic, analysis and/or academic purposes.

[0715] Cells, tissues or organs can be contacted ex vivo or in vitro with a (modified) cyclic GFR-binding compound or a functionalised bioactive carrier by any suitable method, including mixing or the use of a delivery vehicle. Effective in vitro or ex vivo culture conditions include, but are not limited to, effective media, bioreactor, temperature, pH and oxygen conditions that permit cell culture. An effective medium refers to any medium in which a given host cell or tissue is typically cultured. Such medium typically comprises an aqueous medium having assimilable carbon, nitrogen and phosphate sources, and appropriate salts, minerals, metals and other nutrients, such as vitamins. Cells can be cultured in conventional fermentation bioreactors, shake flasks, test tubes, microtiter dishes, and petri plates. Culturing can be carried out at a temperature, pH and oxygen content appropriate for a cell or tissue. Such culturing conditions are within the expertise of one of ordinary skill in the art.

[0716] In one aspect, the present disclosure thus also provides a method for inducing tissue formation, in-vitro or ex-vivo, said method comprising the administration to a cell (e.g. a non-fully differentiated cell) of an effective amount of a cyclic GFR-binding compound, a functionalised bioactive carrier or a composition thereof as defined herein.

[0717] In-vivo administration: In one example, (modified) cyclic GFR-binding compounds, functionalised bioactive carriers or pharmaceutical, prophylactic, diagnostic, or imaging compositions are administered by one or more of a variety of routes, including oral, intravenous, intramuscular, intra-arterial, intramedullary, rectal, intravaginal, intrathecal, subcutaneous, intraventricular, transdermal, intradermal, intraperitoneal, topical (e.g. by ointments, creams, powders, lotions, gels, and/or drops), buccal, enteral, mucosal, nasal, vitreal, sublingual, by intra-tracheal instillation, bronchial instillation, and/or inhalation, as an oral spray, nasal spray, and/or aerosol, and/or through a portal vein catheter. In one example, (modified) cyclic GFR-binding compounds, functionalised bioactive carrier or pharmaceutical, prophylactic, diagnostic, or imaging compositions are administered by systemic intravenous injection. In one example, (modified) cyclic GFR-binding compounds, functionalised bioactive carrier or pharmaceutical, prophylactic, diagnostic, or imaging compositions may be administered in a way which allows them to cross the blood-brain barrier, vascular barrier, or other epithelial barrier.

[0718] Delivery: As used herein, unless indicated otherwise or contradictory in context, the term “delivery” refers to the act or manner of delivering a compound, substance, composition, entity, moiety, cargo or payload.

[0719] Delivery Agent: As used herein, unless indicated otherwise or contradictory in context, the term “delivery agent” refers to any substance which facilitates, at least in part, the in vivo delivery of a (modified) cyclic GFR-binding compounds, functionalised bioactive carriers or pharmaceutical, prophylactic, diagnostic, or imaging compositions defined herein to targeted cells.

[0720] Forms suitable for oral administration: A (modified) cyclic GFR-binding compound, functionalised bioactive carrier or pharmaceutical, prophylactic, diagnostic, or imaging compositions of the invention, for example, in certain embodiments, includes forms suitable for oral administration as a tablet, capsule, pill, powder, sustained release formulations, solution, suspension, or for parenteral injection as a sterile solution, suspension or emulsion. Pharmaceutical compositions suitable for the delivery of (modified) cyclic GFR-binding compounds, functionalised bioactive carrier or pharmaceutical, prophylactic, diagnostic, or imaging compositions defined herein and methods for their preparation will be readily apparent to those skilled in the art. Such compositions and methods for their preparation may be found, for example, in certain embodiments, in ‘Remington's Pharmaceutical Sciences’, 19th Edition (Mack Publishing Company, 1995), which is hereby incorporated by reference in its entirety. Oral administration may involve swallowing, so that the compounds or associations enters the gastrointestinal tract, or buccal or sublingual administration may be employed by which the compound enters the blood stream directly from the mouth. Formulations suitable for oral administration include solid formulations, such as tablets, capsules containing particulates, liquids, or powders; lozenges (including liquid-filled), chews; multi- and nano-particulates; gels, solid solution, liposome, films (including muco-adhesive), ovules, sprays and liquid formulations. Liquid formulations include suspensions, solutions, syrups and elixirs. Such formulations may be employed as fillers in soft or hard capsules and typically comprise a carrier, for example, in certain embodiments, water, ethanol, polyethylene glycol, propylene glycol, methylcellulose, or a suitable oil, and one or more emulsifying agents and/or suspending agents. Liquid formulations may also be prepared by the reconstitution of a solid, for example, in certain embodiments, from a sachet. The pharmaceutical associations or compositions defined herein may also be used in fast-dissolving, fast-disintegrating dosage forms such as those described in the art.

[0721] Forms suitable for parenteral administration: In one example, (modified) cyclic GFR-binding compounds, functionalised bioactive carriers or pharmaceutical, prophylactic, diagnostic, or imaging compositions of the invention may be administered by parenteral injection. Exemplary parenteral administration forms include sterile solutions, suspensions or emulsions of the pharmaceutical association defined herein in sterile aqueous media, for example, in certain embodiments, aqueous propylene glycol or dextrose. In another embodiment, the parenteral administration form is a solution. Such parenteral dosage forms can be suitably buffered, if desired. Preferred sterile solutions include sodium chloride, 0.9%, UPS solution. Injectable formulations can be sterilized, for example, in certain embodiments, by filtration through a bacterial-retaining filter, and/or by incorporating sterilizing agents in the form of sterile solid compositions which can be dissolved or dispersed in sterile water or other sterile injectable medium prior to use.

[0722] Forms suitable for rectal and vaginal administration: Compositions for rectal or vaginal administration are typically suppositories which can be prepared by mixing compositions with suitable non-irritating excipients such as cocoa butter, polyethylene glycol or a suppository wax which are solid at ambient temperature but liquid at body temperature and therefore melt in the rectum or vaginal cavity and release the active ingredient.

[0723] Forms suitable for topical and/or transdermal administration: Dosage forms for topical and/or transdermal administration of a composition may include ointments, pastes, creams, lotions, gels, powders, solutions, sprays, inhalants and/or patches. Generally, an active ingredient is admixed under sterile conditions with a pharmaceutically acceptable excipient and/or any needed preservatives and/or buffers as may be required.

[0724] Forms suitable for pulmonary administration: Dosage forms for pulmonary administration via the buccal cavity may comprise dry particles which comprise the active ingredient (e.g. the pharmaceutical association defined herein) and which have a diameter in the range from about 0.5 nm to about 7 nm. Such compositions are conveniently in the form of dry powders for administration using a device comprising a dry powder reservoir to which a stream of propellant may be directed to disperse the powder and/or using a self-propelling solvent/powder dispensing container such as a device comprising the active ingredient dissolved and/or suspended in a low-boiling propellant in a sealed container. Pharmaceutical compositions formulated for pulmonary delivery may provide an active ingredient in the form of droplets of a solution and/or suspension. Such formulations may be prepared, packaged, and/or sold as aqueous and/or dilute alcoholic solutions and/or suspensions, optionally sterile, comprising active ingredient, and may conveniently be administered using any nebulization and/or atomization device. Such formulations may further comprise one or more additional ingredients including, but not limited to, a flavoring agent such as saccharin sodium, a volatile oil, a buffering agent, a surface active agent, and/or a preservative such as methylhydroxybenzoate.

[0725] Forms suitable for nasal administration: Formulations described herein as being useful for pulmonary delivery are also useful for intranasal delivery of a pharmaceutical composition. Formulations suitable for nasal administration may, for example, in certain embodiments, comprise from about as little as 0.1% (w/w) and as much as 100% (w/w) of active ingredient (e.g. the pharmaceutical association defined herein), and may comprise one or more of the additional ingredients described herein. A pharmaceutical composition may be prepared, packaged, and/or sold in a formulation suitable for buccal administration. Such formulations may, for example, in certain embodiments, be in the form of tablets and/or lozenges made using conventional methods, and may, for example, in certain embodiments, 0.1% to 20% (w/w) active ingredient, the balance comprising an orally dissolvable and/or degradable composition and, optionally, one or more of the additional ingredients described herein. Alternately, formulations suitable for buccal administration may comprise a powder and/or an aerosolized and/or atomized solution and/or suspension comprising active ingredient. Such powdered, aerosolized, and/or aerosolized formulations, when dispersed, may have an average particle and/or droplet size in the range from about 0.1 nm to about 200 nm, and may further comprise one or more of any additional ingredients described herein.

[0726] Forms suitable for ophthalmic administration: Dosage forms for ophthalmic administration include, for example, in certain embodiments, eye drops including, for example, in certain embodiments, a 0.1/1.0% (w/w) solution and/or suspension of the active ingredient (e.g. the pharmaceutical association defined herein) in an aqueous or oily liquid excipient. Such drops may further comprise buffering agents, salts, and/or one or more other of any additional ingredients described herein. Other opthalmically-administrable formulations which are useful include those which comprise the active ingredient in microcrystalline form and/or in a liposomal preparation. Ear drops and/or eye drops are contemplated as being within the scope of this present disclosure.

[0727] Direct injection: One preferred administration method for delivering (modified) cyclic GFR-binding compounds, functionalised bioactive carriers or pharmaceutical, prophylactic, diagnostic, or imaging compositions as defined herein is by local administration, in particular, by direct injection. Direct injection techniques are particularly useful for administering a composition to a cell or tissue that is accessible by surgery, and particularly, on or near the surface of the body. Administration of a composition locally within the area of a target cell refers to injecting the composition centimeters and preferably, millimeters from the target cell or tissue.

[0728] Dosage regimens: The dosage regimen of the (modified) cyclic GFR-binding compounds, functionalised bioactive carriers or pharmaceutical, prophylactic, diagnostic, or imaging compositions as defined herein may be adjusted to provide the optimum desired response. For example, in certain embodiments, a single bolus may be administered, several divided doses may be administered over time or the dose may be proportionally reduced or increased as indicated by the exigencies of the therapeutic situation. The appropriate dosing regimen, the amount of each dose administered and/or the intervals between doses will depend upon the pharmaceutical association being used, the type of pharmaceutical composition, the characteristics of the subject in need of treatment and the severity of the condition being treated. Thus, the skilled artisan would appreciate, based upon the disclosure provided herein, that the dose and dosing regimen is adjusted in accordance with methods well-known in the therapeutic arts. That is, the maximum tolerable dose can be readily established, and the effective amount providing a detectable therapeutic benefit to a patient may also be determined, as can the temporal requirements for administering each agent to provide a detectable therapeutic benefit to the patient. Accordingly, while certain dose and administration regimens are exemplified herein, these examples in no way limit the dose and administration regimen that may be provided to a patient in practicing the present invention. In general, pharmaceutical compositions in accordance with the present disclosure may be administered at dosage levels sufficient to deliver from about 0.0001 mg/kg to about 100 mg/kg, from about 0.01 mg/kg to about 50 mg/kg, from about 0.1 mg/kg to about 40 mg/kg, from about 0.5 mg/kg to about 30 mg/kg, from about 0.01 mg/kg to about 10 mg/kg, from about 0.1 mg/kg to about 10 mg/kg, or from about 1 mg/kg to about 25 mg/kg, of subject body weight per day, one or more times a day, to obtain the desired therapeutic, diagnostic, prophylactic, or imaging effect. The desired dosage may be delivered three times a day, two times a day, once a day, every other day, every third day, every week, every two weeks, every three weeks, or every four weeks. In certain embodiments, the desired dosage may be delivered using multiple administrations (e.g., two, three, four, five, six, seven, eight, nine, ten, eleven, twelve, thirteen, fourteen, or more administrations). It is to be further understood that for any particular subject, specific dosage regimens should be adjusted over time according to the individual need and the professional judgment of the person administering or supervising the administration of the compositions, and that dosage ranges set forth herein are exemplary only and are not intended to limit the scope or practice of the present invention. For example, in certain embodiments, doses may be adjusted based on pharmacokinetic or pharmacodynamic parameters, which may include clinical effects such as toxic effects and/or laboratory values. Thus, the present invention encompasses intra-patient dose-escalation as determined by the skilled artisan. Determining appropriate dosages and regiments for administration of the chemotherapeutic agent are well-known in the relevant art and would be understood to be encompassed by the skilled artisan once provided the teachings disclosed herein.

[0729] Effective dose parameters: The dosage regimen of the (modified) cyclic GFR-binding compounds or functionalised bioactive carriers and/or pharmaceutical compositions as defined herein may be adjusted to obtain effective dose parameters. Effective dose parameters can be determined using methods standard in the art for a particular disease or condition. In particular, the effectiveness of dose parameters of a therapeutic composition as defined herein can be determined by assessing response rates. Such response rates refer to the percentage of treated patients in a population of patients that respond with either partial or complete remission.

[0730] A pharmaceutical composition as defined herein may be prepared, packaged, or sold in bulk, as a single unit dose, or as a plurality of single unit doses.

[0731] Unit dose: As used herein, unless indicated otherwise or contradictory in context, the term “unit dose” refers to a discrete amount of the pharmaceutical composition comprising a predetermined amount of the active ingredient. The amount of the active ingredient is generally equal to the dosage of the active ingredient which would be administered to a subject or a convenient fraction of such a dosage such as, for example, in certain embodiments, one-half or one-third of such a dosage.

[0732] Single unit dose: As used herein, unless indicated otherwise or contradictory in context, the term “single unit dose” refers to a dose of any therapeutic association or composition administered in one dose/at one time/single route/single point of contact, i.e., single administration event.

[0733] Split dose: As used herein, unless indicated otherwise or contradictory in context, the term “split dose” refers to the division of single unit dose or total daily dose into two or more doses.

[0734] Total daily dose: As used herein, unless indicated otherwise or contradictory in context, the term “total daily dose” refers to an amount given or prescribed in 24 hr period. It may be administered as a single unit dose.

[0735] The relative amounts of the active ingredient(s), the pharmaceutically acceptable excipients, carriers or vehicles, and any additional ingredients in a pharmaceutical composition defined herein will vary, depending upon the identity, size, and condition of the subject treated and further depending upon the route by which the composition is to be administered. In addition to the active ingredient, a pharmaceutical composition of the invention may further comprise one or more additional pharmaceutically active agents.

[0736] Combination therapy: Compounds, associations, compositions or formulations defined herein may be used in combination with one or more other therapeutic, prophylactic, diagnostic, or imaging agents. As used herein, the term “in combination with” is not intended to imply that the agents must be administered at the same time and/or formulated for delivery together, although these methods of delivery are within the scope of the present disclosure. Compositions can be administered concurrently with, prior to, or subsequent to, one or more other desired therapeutics or medical procedures. In some embodiments, they are administered within about 90, 60, 30, 15, 10, 5, or 1 minute of one another. In some embodiments, the administrations of the agents are spaced sufficiently closely together such that a combinatorial (e.g., a synergistic) effect is achieved. In general, each agent will be administered at a dose and/or on a time schedule determined for that agent. In one example, the present disclosure encompasses the delivery of pharmaceutical, prophylactic, diagnostic, or imaging compositions in combination with agents that improve their bioavailability, reduce and/or modify their metabolism, inhibit their excretion, and/or modify their distribution within the body. It will further be appreciated that therapeutically, prophylactically, diagnostically, or imaging active agents used in combination may be administered together in a single composition or administered separately in different compositions. In general, it is expected that agents used in combination with be used at levels that do not exceed the levels at which they are used individually. In one example, the levels used in combination will be lower than those utilized individually. The particular combination of therapies to employ in a combination regimen will take into account compatibility of the desired therapeutics and/or procedures and the desired therapeutic effect to be achieved. It will also be appreciated that the therapies employed may achieve a desired effect for the same disorder, or they may achieve different effects (e.g., control of any adverse effects).

[0737] Although the descriptions of pharmaceutical compositions provided herein are principally directed to pharmaceutical compositions which are suitable for administration to mammals, in particular humans, it will be understood by the skilled artisan that such compositions are generally suitable for administration to animals of all sorts, in particular to any member of the Vertebrate class. Modification of pharmaceutical compositions suitable for administration to humans in order to render the compositions suitable for administration to various animals is well understood, and the ordinarily skilled veterinary pharmacologist can design and/or perform such modification with merely ordinary, if any, experimentation. Subjects to which administration of the pharmaceutical compositions is contemplated include, but are not limited to, humans and/or other primates; mammals, including commercially relevant mammals such as cattle, pigs, horses, sheep, cats, dogs, mice, and/or rats; and/or birds, including commercially relevant birds such as chickens, ducks, geese, and/or turkeys.

### XIII. Dermatological Applications

[0738] When the cell or tissue to be regenerated, repaired or treated is a skin cell or tissue (mainly from the fibroblast lineage), the pharmaceutical composition defined herein may be a dermatological composition comprising at least one (modified) cyclic GFR-binding compound or at least one functionalised bioactive carrier, as all defined herein, and at least one dermatologically acceptable excipient.

[0739] For example, in certain embodiments, a dermatological composition for the uses of the invention may contain between 0.01% and 100% by weight (over the total weight of the dermatological composition) of a cyclic GFR-binding compound or functionalised bioactive carrier, both as defined herein, as a dermatological effective amount. The dermatological composition particularly comprises between 0.01% and 95%, between 0.01% and 90%, between 0.01% and 85%, between 0.01% and 80%, between 0.01% and 75%, between 0.01% and 70%, between 0.01% and 65%, between 0.01% and 60%, between 0.01% and 55%, between 0.01% and 50%, between 0.01% and 45%, between 0.01% and 40%, between 0.01% and 35%, between 0.01% and 30%, between 0.01% and 25%, between 0.01% and 20%, between 0.01% and 15%, between 0.01% and 10%, between 0.01% and 5%, between 0.1% and 100%, between 0.1% and 95%, between 0.1% and 90%, between 0.1% and 85%, between 0.1% and 80%, between 0.1% and 75%, between 0.1% and 70%, between 0.1% and 65%, between 0.1% and 60%, between 0.1% and 55%, between 0.1% and 50%, between 0.1% and 45%, between 0.1% and 40%, between 0.1% and 35%, between 0.1% and 30%, between 0.1% and 25%, between 0.1% and 20%, between 0.1% and 15%, between 0.1% and 10%, and between 0.1% and 5% by weight (over the total weight of the dermatological composition) of any one of a cyclic GFR-binding compound or a functionalised bioactive carrier.

[0740] Dermatologically acceptable: As used herein, unless indicated otherwise or contradictory in context, the term “dermatologically acceptable” means that the compound(s) or pharmaceutical association(s) used are adapted for use in contact with human skin without undue toxicity, incompatibility, instability, allergic response, or their equivalents.

[0741] Dermatological formulations: Suitable formulation for implementing dermatological embodiments of the invention include an aqueous or oil-based solution, a water-based cream or gel or an oily gel, usually in a jar or a tube, particularly a shower gel, shampoo, milk, emulsion, microemulsion or nanoemulsion, particularly oil-in-water or water-in-oil or multiple of silicone-based; a lotion, particularly in a glass or plastic bottle of a spray or aerosol bottle, a blister-pack, liquid soap, a dermatological bar of soap, a pomade, mousse, an anhydrous product, preferably liquid, cream or solid, for example in the form of a stick, particularly in the form of lipstick, a cataplasm or a patch.

[0742] Preferred administration routes include, but are not limited to, oral, topical or intradermal as already defined herein.

[0743] Dermatologically acceptable excipients: Suitable dermatologically acceptable excipients for implementing embodiments of the invention include, but are not limited to, preservatives, emollients, emulsifiers, surfactants, moisturizers, thickeners, conditioners, mattifying agents, stabilizers, antioxidants, texturizing agents, shine agents, filmogenic agents, solubilizers, pigments, colorants, perfumes, and solar filters. These excipients are preferably chosen from among the group consisting of amino acids and their derivatives, polyglycerols, esters, polymers and cellulose derivatives, lanoline derivatives, phospholipids, lactoferrins, lactoperoxidases, sucrose-based stabilizers, vitamin E and its derivatives, natural and synthetic waxes, vegetable oils, triglycerides, insaponifiables, phytosterols, plant esters, silicones and their derivatives, protein hydrolysates, jojoba oil and its derivatives, lipo/hydrosoluble esters, betaines, aminoxides, saccharose ester plant extracts, titanium dioxides, glycines, parabens, and even more preferably from among the group consisting of butylene glycol, glycol-15 stearyl ether, cetearyl alcohol, phenoxyethanol, methylparaben, propylparaben, butylparaben, butylenes glycol, natural tocopherols, glycerine, dihydroxycetyl sodium phosphate, isopropyl hydroxycetyl ether, le glycol stearate, triisononanoin, octyl cocoate, polyacrylamide, isoparaffin, laureth-7, carbomer, propylene glycol, glycerol, bisabolol, dimethicone, sodium hydroxide, PEG 30-dipolyhydroxysterate, capric/caprylic triglycerides, cetearyl octanoate, dibutyl adipate, grapeseed oil, jojoba oil, magnesium sulfate, EDTA, cyclomethicone, xanthan gum, citric acid, sodium lauryl sulfate, mineral waxes and oils, isostearyl isostearate, dipelargonate of propylene glycol, isostearate of propylene glycol, PEG 8, beeswax, glyceride of hydrogenated palm kernel oil, lanolin oil, sesame oil, cetyl lactate, lanolin alcohol, titanium dioxide, lactose, saccharose, low-density polyethylene, and isotonic salt solution.

[0744] In one example, the dermatological composition as defined herein may contain at least one other active agents and/or excipients and/or additives of pharmaceutical, especially dermatological, interest such as agents with the following properties:
[0745] wound-healing properties; such as panthenol and derivatives thereof, for example ethyl panthenol, aloe vera, pantothenic acid and derivatives thereof, allantoin, bisabolol, and dipotassium glycyrrhizinate;
[0746] anti-inflammatory properties: such as steroidal and non-steroidal antiinflammatories, in particular Inhibitors of the production of cytokines and chemokines, of cyclooxygenase, of nitric oxide (NO) and nitric oxide synthase (NOS). As an example of anti-inflammatory products, mention may be made of extracts of Ginkgo biloba, trilactone terpenes such as ginkgolides, especially ginkgolide B and bilobalide known for their platelet-activating factor (PAF) antagonist properties.

[0747] The CTFA Cosmetic Ingredient Handbook, Second Edition (1992), which is hereby incorporated by reference in its entirety, describes different cosmetic and pharmaceutical ingredients currently used in the cosmetic and pharmaceutical industry that are particularly adapted to topical use and which may be used in a dermatological composition of the invention. Examples of these types of ingredients include but are not limited to the following compounds: abrasives, absorbent compounds, compounds with aesthetic purposes such as perfumes, pigments, colorants, essential oils, astringents, etc. (for example: clove oil, menthol, camphor, eucalyptus oil, eugenol, menthyl lactate, and hamelis distillate), anti-acne agents, anti-flocculant agents, anti-foaming agents, anti-microbial agents (for example iodopropyl butylcarbamate), les antioxidants, bonding agents, biological additives, tampon agents, swelling agents, chelatants, additives, biocidal agents, denaturants, external analgesics, film-forming materials, polymers, opacifying agents, pH adjusters, reducing agents, depigmenting or lightening agents (for example: hydroquinone, kojic acid, ascorbic acid, magnesium ascorbyl phosphate, ascorbyl glucosamine), conditioning agents (for example: humectants), calming agents for the skin and/or scarring agents (for example: panthenol and its derivatives, for example ethyl panthenol), aloe vera, pantothenic acid and its derivatives, allantoin, bisabolol and dipotassium glycyrrhizinate), thickeners, vitamins, and the derivatives or equivalents of these.

[0748] In one aspect, the present disclosure provides a (modified) cyclic GFR-binding compound, a functionalised bioactive carrier, or a dermatological composition, all as defined herein, for use in preventing and/or treating scars and/or inflammations such as gingivitis.

[0749] In one particular example, the dermatological composition is intended for treating skin in which the dermis is at least partially damaged, especially in subjects who have undergone a surgical operation, or who have been burned and/or injured. This treatment makes it possible to stimulate the proliferation and/or the activity of fibroblasts, in order to stimulate tissue repair and/or dermal reconstruction.

[0750] In one aspect, the present disclosure provides a (modified) cyclic GFR-binding compound, a functionalised bioactive carrier, or a dermatological composition, all as defined herein, for use in preventing and/or treating at least one of acne, alopecia areata, bowen's disease, congenital erythropoietic porphyria, contact dermatitis, darier's disease, eczema (atopic eczema), epidermolysis bullosa simplex, erythropoietic protoporphyria, fungal infections of nails, hailey-hailey disease, herpes simplex, hidradenitis suppurativa, hirsutism, hyperhidrosis, ichthyosis, impetigo, keloids, keratosis pilaris, lichen planus, lichen sclerosus, melasma, pemphigus vulgaris, plantar warts (verrucas), pityriasis lichenoides, polymorphic light eruption, psoriasis, pyoderma gangrenosum, rosacea, scabies, shingles and vitiligo.

[0751] In one aspect, the present disclosure also provides a dermatological care or treatment method for a subject having need thereof, said method comprising the topical application, intradermal injection or oral administration, preferably the topical application or the intradermal injection, of a (suitable amount of) at least one (modified) cyclic GFR-binding compound, functionalised bioactive carrier, or dermatological composition, all as defined herein.

[0752] Such a dermatological care or treatment method includes the applications cited herein.

[0753] Suitable as amounts of (modified) cyclic GFR-binding compounds or functionalised bioactive carrier for implementing embodiments of the invention in the dermatological field include the group consisting of between about 0.0001 μg/day to about 5000 mg/day, between about 0.0001 μg/day to about 1000 mg/day, between about 0.0001 μg/day to about 10 mg/day, between about 0.0001 μg/day to about 1 mg/day, or between about 0.0001 μg/day to about 100 μg/day, all being preferred for implementing embodiments of the invention.

[0754] Advantageously, the subject who has need thereof is a subject chosen from a population having an average age of more than 30 years old or who has had sunlight over-exposure, has a family history of skin conditions.

### XIV. Ophthalmic Applications

[0755] Preferable dosage forms for the (modified) cyclic GFR-binding compound functionalised bioactive carrier or pharmaceutical composition, all as defined herein, for treating eye retina diseases, disorders or conditions include, for example, in certain embodiments, eye drops and eye ointments. These can be prepared using conventional techniques. For instance, eye drops may be prepared, using isotonic agents such as sodium chloride, buffers such as sodium phosphate, and preservatives such as benzalkonium chloride. A suitable pH is within an ophthalmologically acceptable range. Preferred pH is within pH 4 to 8.

[0756] Particularly preferred administration routes include vitreal and intraocular.

[0757] A suitable dose of (modified) cyclic GFR-binding compound, functionalised bioactive carrier, or pharmaceutical composition for treating eye disorders is appropriately selected, depending on the symptoms, age of patients, dosage form and the like. For eye drops, suitable concentration may be 0.0001 to 10 w/v %, preferably 0.0001 to 0.01 w/v % for administration into eyes once or several times a day.

### XV. Surgical Treatments

[0758] The (modified) cyclic GFR-binding compounds, functionalised bioactive carriers, and pharmaceutical compositions, all as defined herein, may be used in surgical methods suitable for protecting (e.g. treating or preventing) a patient or subject from a disease, condition, disorder or pathology to whom a surgical intervention would be beneficial.

[0759] For example, in certain embodiments, said surgical method may be selected from the group consisting of bone-repair surgery, cartilage-repair surgery, heart surgery, kidneys or lung surgery, eye surgery, muscle-repair surgery, and tendon/ligament-repair surgery.

[0760] In one aspect, the present invention thus discloses a surgical method for surgical treatment comprising the contacting of at least one (modified) cyclic GFR-binding compound, at least one functionalised bioactive carrier, a pharmaceutical, prophylactic, diagnostic or imaging composition thereof, or medical device, all as defined herein, with a body part of a patient to be treated, wherein said contacting induces stem cell differentiation and tissue formation.

[0761] In one example, said surgical method comprises the placement or implantation of an implantable medical device comprising a (modified) cyclic GFR-binding compound, a functionalised bioactive carrier, or a pharmaceutical, prophylactic, diagnostic or imaging composition thereof, all as defined herein, inside a patient or subject in need of such a surgical treatment.

[0762] For example, in certain embodiments, the surgical treatment of the invention may include the use of a placement, insertion or depositing device for contacting said cyclic GFR-binding compound, said functionalised bioactive carrier, or a pharmaceutical, prophylactic, diagnostic or imaging composition thereof with a body part of a patient or subject in need of such a treatment. In one example, said placement, insertion or depositing device comprises an injection device such as a syringe.

[0763] In certain embodiments, said surgical method comprises the positioning of a cyclic GFR-binding compound, a functionalised bioactive carrier, or a pharmaceutical, prophylactic, diagnostic or imaging composition thereof, all as defined herein, inside said injection device for injection into a patient or into a body part of a patient.

[0764] In one example, said medical device comprises titanium and/or PEEK and/or PET and/or hydrogel and/or ceramic. In one particular example, said medical device replaces part of or all of a body part of a patient or subject. In one example, said body part is a malfunctioning or damaged body part such as, for instance, a bone, the skin, the hair scalp, an eye, etc.

### XVI. Pharmaceutical Applications, Uses and Methods

[0765] Some growth factors interact with type I and II growth factor receptors belonging to the serine threonine kinase family. Conventionally, to mediate signaling pathways, growth factors interact with these receptors by forming specific dimeric or oligomeric structures. The type-II receptor, which is constitutively active, phosphorylates the type-I receptor, which then activates the transduction pathway Smad1/5/8. Receptors of both types are thus conventionally needed to form a functional complex in order to initiate further signaling events. Phosphorylated Smads then dissociate from the receptors and bind Smad4, a common mediator, leading to nuclear translocation, regulation of specific genes, and eventually may induce tissue regeneration.

[0766] Prior in-vitro and in-vivo scientific studies have reported that influencing the natural/conventional biology of human mesenchymal stem cells using exogenous entity or molecules such as recombinant growth factor proteins or peptide fragments thereof, may have an effect on cell differentiation and tissue regeneration. A (modified) cyclic GFR-binding compound or a functionalised bioactive carrier of the present disclosure may be one such exogenous entity or molecule.

[0767] For example, in certain embodiments, medical treatments may demonstrate the effect of the influence of an exogenous entity or molecule on human mesenchymal stem cells using a medical device onto or into which such an exogenous entity or molecule has been reversibly or irreversibly incorporated or deposited, both being equally preferred, and placed into a patient in need thereof.

[0768] In one example, medical treatments may provide the effect of the influence of an exogenous entity or molecule on human mesenchymal stem cells using a pharmaceutical composition containing such an exogenous entity or molecule and a pharmaceutically acceptable excipient or carrier, administered, for instance, orally, enterically, intravenously, peritoneally, subcutaneously, transdermally, parenterally, or rectally, to a patient in need of such a treatment.

[0769] As already stated herein, for in-vivo administration, compounds or compositions of the present invention may be injected at a target site so that they can be delivered in close proximity to the cells to be treated via, e.g. a PTD or cell-permeable peptide. Alternately, an implant (or medical device or implantable medical device) comprising a PTD/cyclic GFR-binding compound complex may be used.

[0770] The present invention generally provides for uses and methods of inducing mesenchymal stem cell or progenitor cell (at any stage of differentiation) differentiation and/or inducing, promoting, enhancing, controlling or regulating tissue regeneration/formation in-vitro, ex-vivo and in-vivo.

[0771] Conveniently, such a tissue formation process is generally achieved within less than 7 days. In particular, such a tissue formation process is generally achieved within less than 6 days. In particular, such a tissue formation process is generally achieved within less than 5 days. In particular, such a tissue formation process is generally achieved within less than 4 days. In particular, such a tissue formation process is generally achieved within less than 3 days. In particular, such a tissue formation process is generally achieved within less than 2 days. In particular, such a tissue formation process is generally achieved within less than 24 hours. In particular, such a tissue formation process is generally achieved within less than 18 hours.

[0772] In one aspect, the present disclosure provides a pharmaceutical (therapeutic, dermatologic, ophthalmologic, diagnostic, etc.) composition as defined herein for use in a method of non-mutagenically inducing tissue formation i.e. without modifying or altering the genome of the treated cells, in-vitro, ex-vivo or in-vivo. Also provided is a method of inducing tissue formation i.e. without modifying or altering the genome of the treated cells, comprising the in-vitro, ex-vivo or in-vivo administration of an effective amount of a (modified) cyclic GFR-binding compound, a functionalised bioactive carrier, or a pharmaceutical (therapeutic, dermatologic, ophthalmologic, diagnostic, etc.) composition as defined herein.

[0773] In one aspect, the present disclosure provides a pharmaceutical (therapeutic, dermatologic, ophthalmologic, diagnostic, etc.) composition as defined herein for use in a method of extracellular induction of tissue formation. Also provided is a method of extracellular tissue formation induction, comprising the in-vitro, ex-vivo or in-vivo administration of an effective amount of a (modified) cyclic GFR-binding compound, a functionalised bioactive carrier, or a pharmaceutical (therapeutic, dermatologic, ophthalmologic, diagnostic, etc.) composition as defined herein.

[0774] An extracellular treatment as used herein implies a biological action/effect to be provided or to occur outside the cell to be treated (i.e. a mesenchymal stem cell). In other words, the biologically active agent (e.g. the cyclic GFR-binding compound or the pharmaceutical composition as defined herein) delivers/provides its biological/pharmaceutical effect to the outside of the cell (e.g. on the cell's surface) without the need to penetrate through the cell membrane, inside the cell to be treated. Once the extracellular action/effect has been administered/delivered to the cell to be treated, said active agent may be, for instance, excreted from the host organism with or without being metabolised, and/or tagged to be destroyed through apoptotic routes, and/or internalised by nearby cells, etc.

[0775] In one aspect, the present disclosure provides a method of producing a physiologically functional and healthy cell, comprising the administration in-vitro, ex-vivo or in-vivo to a mesenchymal stem cell or progenitor cell (at any stage of differentiation) of an effective amount of a (modified) cyclic GFR-binding compound, a functionalised bioactive carrier, or a pharmaceutical (therapeutic, dermatologic, ophthalmologic, diagnostic, etc.) composition as defined herein and wherein said physiologically functional and healthy cell is selected from the group consisting of an osteoblast, osteocyte, chondroblast, chondrocyte, neuroblast, neurocyte, Sertoli cells, Leydig cell, Germ cell, Myoblast, Myocyte, keratinocyte, endothelial cells, angioblast, fibroblast, fibrocyte, podocyte, areolar connective cells, adipocytes, pre-adipocytes/lipoblasts, epithelial cells, erythrocytes, alveolar cells, hematopoietic stem cells (HSC), myeloid progenitors, lymphoid progenitors, mast cells, myeloblasts, monocytes, macrophages, neutrophils, basophils, eosinophils, erythrocytes, megakaryocytes, thrombocytes, dendritic cells, small lymphocytes, T-lymphocytes (T-cells), B-lymphocytes (B-cells), and natural killer (NK)-cells.

[0776] In one aspect, the present disclosure provides methods to activate a growth factor receptor present on the surface of a mesenchymal stem cell or progenitor cell (at any stage of differentiation), said method comprising administering to said mesenchymal stem cell or progenitor cell (at any stage of differentiation) an effective amount of a (modified) cyclic GFR-binding compound, a functionalised bioactive carrier, or a pharmaceutical (therapeutic, dermatologic, ophthalmologic, diagnostic, etc.) composition as defined herein, wherein administering said cyclic GFR-binding compound, a functionalised bioactive carrier, or a pharmaceutical (therapeutic, dermatologic, ophthalmologic, diagnostic, etc.) composition as defined herein activates the growth factor receptor present on the surface of the mesenchymal stem cell or progenitor cell (at any stage of differentiation).

[0777] In one aspect, the present disclosure provides methods of delivering a (modified) cyclic GFR-binding compound, a functionalised bioactive carrier, or a pharmaceutical (therapeutic, dermatologic, ophthalmologic, diagnostic, etc.) composition, all as defined herein, in-vitro, ex-vivo or in-vivo to a mesenchymal stem cell or progenitor cell (at any stage of differentiation), comprising the contacting of said mesenchymal stem cell or progenitor cell (at any stage of differentiation) with said (modified) cyclic GFR-binding compound, a functionalised bioactive carrier, or a pharmaceutical (therapeutic, dermatologic, ophthalmologic, diagnostic, etc.) composition.

[0778] In one aspect, the present disclosure provides methods of administering a (modified) cyclic GFR-binding compound, a functionalised bioactive carrier, or a pharmaceutical (therapeutic, dermatologic, ophthalmologic, diagnostic, etc.) composition, all as defined herein, to a patient or subject comprising the contacting of at least one body part of said patient or subject with said (modified) cyclic GFR-binding compound, a functionalised bioactive carrier, or a pharmaceutical (therapeutic, dermatologic, ophthalmologic, diagnostic, etc.) composition.

[0779] In one example, the (modified) cyclic GFR-binding compound, functionalised bioactive carrier, or pharmaceutical (therapeutic, dermatologic, ophthalmologic, diagnostic, etc.) composition, all as defined herein, may be a mammal (preferably a human) tissue-inductive compound, bioactive carrier or composition, which has demonstrated the ability to induce tissue formation in vitro and/or in vivo.

[0780] In one aspect, the present disclosure provides an effective amount of at least one (modified) cyclic GFR-binding compound, at least one functionalised bioactive carrier, or at least one pharmaceutical (therapeutic, dermatologic, ophthalmologic, diagnostic, etc.) composition, all as defined herein, for use in a medical method such as in therapy, surgery or in diagnostic methods.

[0781] In one aspect, the present disclosure provides a method of inducing or promoting or enhancing mesenchymal stem cell or progenitor cell (at any stage of differentiation) differentiation, the method comprising administering to the cell an effective amount of at least one (modified) cyclic GFR-binding compound, at least one functionalised bioactive carrier, or at least one pharmaceutical (therapeutic, dermatologic, ophthalmologic, diagnostic, etc.) composition, all as defined herein. In one aspect, the present invention discloses an effective amount of at least one (modified) cyclic GFR-binding compound, at least one functionalised bioactive carrier, or at least one pharmaceutical (therapeutic, dermatologic, ophthalmologic, diagnostic, etc.) composition, all as defined herein, for use in a method of inducing or promoting or enhancing mesenchymal stem cell or progenitor cell (at any stage of differentiation) differentiation

[0782] In one aspect, the present disclosure provides a method of inducing or promoting or enhancing or controlling or regulating tissue regeneration/formation, the method comprising administering to a mesenchymal stem cell or to a progenitor cell at any stage of differentiation or to a mature cell an effective amount of at least one (modified) cyclic GFR-binding compound, at least one functionalised bioactive carrier, or at least one pharmaceutical (therapeutic, dermatologic, ophthalmologic, diagnostic, etc.) composition, all as defined herein. In one aspect, the present invention discloses an effective amount of at least one (modified) cyclic GFR-binding compound, at least one functionalised bioactive carrier, or at least one pharmaceutical (therapeutic, dermatologic, ophthalmologic, diagnostic, etc.) composition, all as defined herein, for use in a method of inducing or promoting or enhancing or controlling or regulating tissue regeneration/formation.

[0783] In one aspect, the present disclosure provides a method of inducing and/or promoting and/or enhancing cell motility or single/collective cell migration, the method comprising administering to a mesenchymal stem cell or to a progenitor cell at any stage of differentiation or to a mature cell an effective amount of at least one (modified) cyclic GFR-binding compound, at least one functionalised bioactive carrier, or at least one pharmaceutical (therapeutic, dermatologic, ophthalmologic, diagnostic, etc.) composition, all as defined herein. In one aspect, the present invention discloses an effective amount of at least one (modified) cyclic GFR-binding compound, at least one functionalised bioactive carrier, or at least one pharmaceutical (therapeutic, dermatologic, ophthalmologic, diagnostic, etc.) composition, all as defined herein, for use in a method of inducing and/or promoting and/or enhancing cell motility or single/collective cell migration.

[0784] In one aspect, the present invention discloses a method of inducing and/or promoting and/or enhancing cell maturation, the method comprising administering to a differentiated cell or to a mature cell an effective amount of at least one (modified) cyclic GFR-binding compound, at least one functionalised bioactive carrier, or at least one pharmaceutical (therapeutic, dermatologic, ophthalmologic, diagnostic, etc.) composition, all as defined herein. In one aspect, the present invention discloses an effective amount of at least one (modified) cyclic GFR-binding compound, at least one functionalised bioactive carrier, or at least one pharmaceutical (therapeutic, dermatologic, ophthalmologic, diagnostic, etc.) composition, all as defined herein, for use in a method of inducing and/or promoting and/or enhancing cell maturation.

[0785] In one example, the (modified) cyclic GFR-binding compound, functionalised bioactive carrier, or pharmaceutical (therapeutic, dermatologic, ophthalmologic, diagnostic, etc.) composition, all as defined herein, may be combined/mixed with adult stem cells and/or multipotent progenitor cells prior to be administered or implanted into a mammal (preferably a human) to promote tissue regeneration.

[0786] In one example, the (modified) cyclic GFR-binding compound, functionalised bioactive carrier, or pharmaceutical (therapeutic, dermatologic, ophthalmologic, diagnostic, etc.) composition, all as defined herein, may be administered as such and may be combined/mixed with adult stem cells and/or multipotent progenitor cells prior to administration to a mammal (preferably a human) to promote tissue regeneration.

[0787] In particular, medical applications which may result from the mediation of type I and II growth factor receptors by a (modified) cyclic GFR-binding compound, functionalised bioactive carrier, or pharmaceutical (therapeutic, dermatologic, ophthalmologic, diagnostic, etc.) composition, all as defined herein, include, but are not limited to, enhancing of osteogenesis, inducing bone formation, inducing osteocyte maturation, and/or treating and/or preventing osteoporosis.

[0788] In one example, a (modified) cyclic GFR-binding compound, functionalised bioactive carrier, or pharmaceutical (therapeutic, dermatologic, ophthalmologic, diagnostic, etc.) composition, all as defined herein, may thus be an osteoinductive compound, bioactive carrier or composition which has demonstrated an ability to induce bone formation in vitro and/or ex-vivo and/or in vivo.

[0789] In one aspect, the present disclosure thus provides:
[0790] a method of inducing or promoting or enhancing mesenchymal stem cell, progenitor osteoblast (at any stage of differentiation of the Osteoblast cell lineage) differentiation, the method comprising administering to the cell an effective amount of at least one (modified) cyclic GFR-binding compound, at least one functionalised bioactive carrier, or at least one pharmaceutical composition, all as defined herein;
[0791] a method of inducing or promoting or enhancing or controlling or regulating bone tissue regeneration/formation, the method comprising administering to a mesenchymal stem cell or to a progenitor osteoblast at any stage of differentiation of the osteoblast cell lineage or to a mature osteoblast, an effective amount of at least one (modified) cyclic GFR-binding compound, at least one functionalised bioactive carrier, or at least one pharmaceutical composition, all as defined herein;
[0792] a method of inducing and/or promoting and/or enhancing osteocyte maturation, the method comprising administering to a differentiated osteoblast or to a mature osteoblast (e.g. an osteocyte) an effective amount of at least one (modified) cyclic GFR-binding compound, at least one functionalised bioactive carrier, or at least one pharmaceutical composition, all as defined herein;
[0793] an effective amount of at least one (modified) cyclic GFR-binding compound, at least one functionalised bioactive carrier, or at least one pharmaceutical composition, all as defined herein for use in a method of inducing or promoting or enhancing mesenchymal stem cell or progenitor osteoblast (at any stage of differentiation of the osteoblast cell lineage) differentiation;
[0794] an effective amount of at least one (modified) cyclic GFR-binding compound, at least one functionalised bioactive carrier, or at least one pharmaceutical composition, all as defined herein for use in a method of inducing or promoting or enhancing or controlling or regulating bone tissue regeneration/formation;
[0795] an effective amount of at least one (modified) cyclic GFR-binding compound, at least one functionalised bioactive carrier, or at least one pharmaceutical composition, all as defined herein for use in a method of inducing and/or promoting and/or enhancing osteoblast maturation.

[0796] In particular, medical applications which may result from the mediation of type I and II growth factor receptors by a (modified) cyclic GFR-binding compound, functionalised bioactive carrier, or pharmaceutical (therapeutic, dermatologic, ophthalmologic, diagnostic, etc.) composition, all as defined herein, include, but are not limited to, enhancing of chondrogenesis and/or inducing cartilage formation, and/or inducing chondrocyte maturation and/or treating and/or preventing at least one of osteoarthritis, costochondritis, Herniation, achondroplasia or relapsing polychondritis.

[0797] In one example, a (modified) cyclic GFR-binding compound, functionalised bioactive carrier, or pharmaceutical (therapeutic, dermatologic, ophthalmologic, diagnostic, etc.) composition, all as defined herein, may be a chondroinductive compound, bioactive carrier or composition which has demonstrated the ability to induce cartilage formation in vitro and/or ex-vivo and/or in vivo.

[0798] In one aspect, the present disclosure thus provides:
[0799] a method of inducing or promoting or enhancing mesenchymal stem cell, progenitor chondroblast (at any stage of differentiation of the chondrocytic cell lineage) differentiation, the method comprising administering to the cell an effective amount of at least one (modified) cyclic GFR-binding compound, at least one functionalised bioactive carrier, or at least one pharmaceutical composition, all as defined herein;
[0800] a method of inducing or promoting or enhancing or controlling or regulating cartilage tissue regeneration/formation, the method comprising administering to a mesenchymal stem cell or to a progenitor chondroblast (at any stage of differentiation of the chondrocytic cell lineage) or to a mature chondroblast, an effective amount of at least one (modified) cyclic GFR-binding compound, at least one functionalised bioactive carrier, or at least one pharmaceutical composition, all as defined herein;
[0801] a method of inducing and/or promoting and/or enhancing chondrocyte maturation, the method comprising administering to a differentiated chondroblast or to a mature osteoblast (e.g. a chondrocyte) an effective amount of at least one cyclic GFR-binding compound, at least one functionalised bioactive carrier, or at least one pharmaceutical composition, all as defined herein;
[0802] an effective amount of at least one (modified) cyclic GFR-binding compound, at least one functionalised bioactive carrier, or at least one pharmaceutical composition, all as defined herein for use in a method of inducing or promoting or enhancing mesenchymal stem cell or progenitor chondroblast (at any stage of differentiation of the chondrocytic cell lineage) differentiation;
[0803] an effective amount of at least one (modified) cyclic GFR-binding compound, at least one functionalised bioactive carrier, or at least one pharmaceutical composition, all as defined herein for use in a method of inducing or promoting or enhancing or controlling or regulating cartilage tissue regeneration/formation;
[0804] an effective amount of at least one (modified) cyclic GFR-binding compound, at least one functionalised bioactive carrier, or at least one pharmaceutical composition, all as defined herein for use in a method of inducing and/or promoting and/or enhancing chondroblast maturation.

[0805] In particular, medical applications which may result from the mediation of type I and II growth factor receptors by a cyclic GFR-binding compound, functionalised bioactive carrier, or pharmaceutical (therapeutic, dermatologic, ophthalmologic, diagnostic, etc.) composition, all as defined herein, include, but are not limited to, enhancing of endothelization and/or vascularization/angiogenesis and/or treating and/or preventing at least one of coronary artery disease (also known as coronary heart disease and ischemic heart disease), cardiomyopathy, hypertensive heart disease, heart failure, cor pulmonale, cardiac dysrhythmias, inflammatory heart disease, endocarditis, inflammatory cardiomegaly, myocarditis, valvular heart disease, cerebrovascular disease, peripheral arterial disease, congenital heart disease, or rheumatic heart disease.

[0806] In one example, a cyclic GFR-binding compound, functionalised bioactive carrier, or pharmaceutical (therapeutic, dermatologic, ophthalmologic, diagnostic, etc.) composition, all as defined herein, may be an endothelization/vascularization/angiogenesis-promoting compound, bioactive carrier or composition which has demonstrated the ability to induce vascular tissue formation in vitro and/or ex-vivo and/or in vivo.

[0807] In one aspect, the present disclosure thus provides:
[0808] a method of inducing or promoting or enhancing mesenchymal stem cell, progenitor endothelial cell (at any stage of differentiation of the vascular cell lineage) differentiation, the method comprising administering to the cell an effective amount of at least one (modified) cyclic GFR-binding compound, at least one functionalised bioactive carrier, or at least one pharmaceutical composition, all as defined herein;
[0809] a method of inducing or promoting or enhancing or controlling or regulating vascular tissue regeneration/formation and/or tubular formation, the method comprising administering to a mesenchymal stem cell or to a progenitor endothelial cell at any stage of differentiation of the vascular cell lineage or to a mature endothelial cell, an effective amount of at least one (modified) cyclic GFR-binding compound, at least one functionalised bioactive carrier, or at least one pharmaceutical composition, all as defined herein;
[0810] a method of inducing and/or promoting and/or enhancing cell motility or single/collective endothelial cell migration and/or angiogenesis, the method comprising administering to a mesenchymal stem cell or to a progenitor endothelial cell at any stage of differentiation of the vascular cell lineage or to a mature endothelial cell an effective amount of at least one (modified) cyclic GFR-binding compound, at least one functionalised bioactive carrier, or at least one pharmaceutical composition, all as defined herein.
[0811] a method of inducing and/or promoting and/or enhancing endothelial cell maturation, the method comprising administering to a differentiated endothelial cell or to a mature endothelial cell an effective amount of at least one (modified) cyclic GFR-binding compound, at least one functionalised bioactive carrier, or at least one pharmaceutical composition, all as defined herein;
[0812] an effective amount of at least one (modified) cyclic GFR-binding compound, at least one functionalised bioactive carrier, or at least one pharmaceutical composition, all as defined herein for use in a method of inducing or promoting or enhancing mesenchymal stem cell, progenitor endothelial cell (at any stage of differentiation of the vascular cell lineage) differentiation;
[0813] an effective amount of at least one (modified) cyclic GFR-binding compound, at least one functionalised bioactive carrier, or at least one pharmaceutical composition, all as defined herein for use in a method of inducing or promoting or enhancing or controlling or regulating vascular tissue regeneration/formation and/or tubular formation;
[0814] an effective amount of at least one (modified) cyclic GFR-binding compound, at least one functionalised bioactive carrier, or at least one pharmaceutical composition, all as defined herein for use in a method of inducing and/or promoting and/or enhancing cell motility or single/collective endothelial cell migration and/or angiogenesis,
[0815] an effective amount of at least one (modified) cyclic GFR-binding compound, at least one functionalised bioactive carrier, or at least one pharmaceutical composition, all as defined herein for use in a method of inducing and/or promoting and/or enhancing endothelial cell maturation.

[0816] In particular, medical applications which may result from the mediation of type I and II growth factor receptors by a cyclic GFR-binding compound, functionalised bioactive carrier, or pharmaceutical (therapeutic, dermatologic, ophthalmologic, diagnostic, etc.) composition, all as defined herein, include, but are not limited to, enhancing axonal dendritic neuron growth thus promoting neuron-regeneration and/or treating and/or preventing and/or decreasing or suppressing neuron degeneration-related conditions and diseases.

[0817] In the present description and unless otherwise indicated, the term “neuron-regeneration” or “neuroregeneration” means the regrowth or repair of nervous tissues, cells or cell products involving the participation of stem cells. Such mechanisms may include generation of new neurons, glia, axons, myelin, or synapses. Neurological disorders in which the present invention may thus be useful include, but are not limited to, ALS, Agraphia Alzheimer's disease, Amyotrophic lateral sclerosis, Angle man syndrome, Aphasia Apraxia, Arachnoiditis, Ataxia Telangiectasia, Attention deficit hyperactivity disorder, Auditory processing disorder, Autism, Alcoholism, asperger's syndrome, Bipolar disorder, Bell's palsy, Brachial plexus injury, Brain damage, Brain injury, Canavan disease, Capgras delusion, Causalgia, Central pain syndrome, Central pontine myelinolysis, Centronuclear myopathy, Cephalic disorder, Cerebral aneurysm, Cerebral arteriosclerosis, Cerebral atrophy, Cerebral gigantism, Cerebral palsy, Cerebral vasculitis, Cervical spinal stenosis, Charcot-Marie-Tooth disease, Chiari malformation, Chorea, Chronic fatigue syndrome, Chronic inflammatory demyelinating polyneuropathy (CIDP), Chronic pain, Coffin-Lowry syndrome, Coma, Complex regional pain syndrome, Compression neuropathy, Congenital facial diplegia, Corticobasal degeneration, Cranial arteritis, Craniosynostosis, Creutzfeldt-Jakob disease, Cumulative trauma disorders, Cushing's syndrome, Cytomegalic inclusion body disease (CIBD), Cytomegalovirus Infection, Dandy-Walker syndrome, Dawson disease, De Morsier's syndrome, Dejerine-Klumpke palsy, Dejerine-Sottas disease, Delayed sleep phase syndrome, Dementia, Dermatomyositis, Developmental coordination disorder, Diabetic neuropathy, Diffuse sclerosis, Downs syndrome, Dravet syndrome, Dysautonomia, Dyscalculia, Dysgraphia, Dyslexia, Dystonia, Empty sella syndrome, Encephalitis, Encephalocele, Encephalotrigeminal angiomatosis, Encopresis, Epilepsy, Erb's palsy, Erythromelalgia, Essential tremor, Fabry's disease, Fahr's syndrome, Fainting, Familial spastic paralysis, Febrile seizures, Fisher syndrome, Friedreich's ataxia, Fibromyalgia, Foville's syndrome, Fetal alcohol syndrome, Fragile X Tremor Ataxia Syndrome, Gaucher's disease, Gerstmann's syndrome, Giant cell arteritis, Giant cell inclusion disease, Globoid Cell Leukodystrophy, Gray matter heterotopia, Guillain-Barré syndrome, HTLV-1 associated myelopathy, Hallervorden-Spatz disease, Head injury, Headache, Hemifacial Spasm, Hereditary Spastic Paraplegia, Heredopathia atactica polyneuritiformis, Herpes zoster oticus, Herpes zoster, Hirayama syndrome, Holoprosencephaly, Huntington's disease, Hydranencephaly, Hydrocephalus, Hypercortisolism, Hypoxia, Immune-Mediated encephalomyelitis, Inclusion body myositis, Incontinentia pigmenti, Infantile Refsum disease, Infantile spasms, Inflammatory myopathy, Intracranial cyst, Intracranial hypertension, Joubert syndrome, Karak syndrome, Kearns-Sayre syndrome, Kennedy disease, Kinsbourne syndrome, Kleine-Levin Syndrome, Klippel Feil syndrome, Krabbe disease, Kugelberg-Welander disease, Lafora disease, Lambert-Eaton myasthenic syndrome, Landau-Kleffner syndrome, Lateral medullary (Wallenberg) syndrome, Learning disabilities, Leigh's disease, Lennox-Gastaut syndrome, Lesch-Nyhan syndrome, Leukodystrophy, Lewy body dementia, Lissencephaly, Locked-In syndrome, Lou Gehrig's disease (See amyotrophic lateral sclerosis), Lumbar disc disease, Lumbar spinal stenosis, Lyme disease—Neurological Sequelae, Machado-Joseph disease (Spinocerebellar ataxia type 3), Macrencephaly, Macropsia, Megalencephaly, Melkersson-Rosenthal syndrome, Menieres disease, Meningitis, Menkes disease, Metachromatic leukodystrophy, Microcephaly, Micropsia, Migraine, Miller Fisher syndrome, Mini-stroke (transient ischemic attack), Misophonia, Mitochondrial myopathy, Mobius syndrome, Monomelic amyotrophy, Motor Neurone Disease—see amyotrophic lateral sclerosis, Motor skills disorder, Moyamoya disease, Mucopolysaccharidoses, Multi-infarct dementia, Multifocal motor neuropathy, Multiple sclerosis, Multiple system atrophy, Muscular dystrophy, Myalgic encephalomyelitis, Myasthenia gravis, Myelinoclastic diffuse sclerosis, Myoclonic Encephalopathy of infants, Myoclonus, Myopathy, Myotubular myopathy, Myotonia congenital, Narcolepsy, Neuro-Behçet's disease, Neurofibromatosis, Neuroleptic malignant syndrome, Neurological manifestations of AIDS, Neurological sequelae of lupus, Neuromyotonia, Neuronal ceroid lipofuscinosis, Neuronal migration disorders, Neuropathy, Neurosis, Niemann-Pick disease, Non-24-hour sleep-wake disorder, Nonverbal learning disorder, O'Sullivan-McLeod syndrome, Occipital Neuralgia, Occult Spinal Dysraphism Sequence, Ohtahara syndrome, Olivopontocerebellar atrophy, Opsoclonus myoclonus syndrome, Optic neuritis, Orthostatic Hypotension, Otosclerosis, Overuse syndrome, Palinopsia, Paresthesia, Parkinson's disease, Paramyotonia Congenita, Paroxysmal attacks, Parry-Romberg syndrome, Pelizaeus-Merzbacher disease, Periodic Paralyses, Peripheral neuropathy, Pervasive developmental disorders, Photic sneeze reflex, Phytanic acid storage disease, Pick's disease, Pinched nerve, PMG, Polyneuropathy, Polio, Polymicrogyria, Polymyositis, Porencephaly, Post-Polio syndrome, Postherpetic Neuralgia (PHN), Postural Hypotension, Prader-Willi syndrome, Primary Lateral Sclerosis, Prion diseases, Progressive hemifacial atrophy, Progressive multifocal leukoencephalopathy, Progressive Supranuclear Palsy, Quadriplegia, Rabies, Ramsay Hunt syndrome type I, Ramsay Hunt syndrome type II, Ramsay Hunt syndrome type III, Rasmussen's encephalitis, Reflex neurovascular dystrophy, Refsum disease, Repetitive stress injury, Restless legs syndrome, Retrovirus-associated myelopathy, Rett syndrome, Reye's syndrome, Rhythmic Movement Disorder, Romberg syndrome, Saint Vitus dance, Sandhoff disease, Schizencephaly, Sensory processing disorder, Septo-optic dysplasia, Shaken baby syndrome, Shingles, Shy-Drager syndrome, Sjögren's syndrome, Sleep apnea, Sleeping sickness, Snatiation, Sotos syndrome, Spasticity, Spina bifida, Spinal cord injury, Spinal muscular atrophy, Spinocerebellar ataxia, Split-brain, Steele-Richardson-Olszewski syndrome, Stiff-person syndrome, Stroke, Sturge-Weber syndrome, Subacute sclerosing panencephalitis, Subcortical arteriosclerotic encephalopathy, Superficial siderosis, Syden ham's chorea, Syncope, Synesthesia, Syringomyelia, Tarsal tunnel syndrome, Tardive dyskinesia, Tardive dysphrenia, Tarlov cyst, Tay-Sachs disease, Temporal arteritis, Tetanus, Tethered spinal cord syndrome, Thomsen disease, Thoracic outlet syndrome, Tic Douloureux, Todd's paralysis, Tourette syndrome, Toxic encephalopathy, Transient ischemic attack, Transmissible spongiform encephalopathies, Transverse myelitis, Traumatic brain injury, Tremor, Trigeminal neuralgia, Tropical spastic paraparesis, Trypanosomiasis, Tuberous sclerosis, Ubisiosis, Von Hippel-Lindau disease (VHL), Viliuisk Encephalomyelitis (VE), Wallenberg's syndrome, Werdnig-Hoffman disease, West syndrome, Whiplash, Williams syndrome, Wilson's disease and Zellweger syndrome.

[0818] In one example, a cyclic GFR-binding compound, functionalised bioactive carrier, or pharmaceutical (therapeutic, dermatologic, ophthalmologic, diagnostic, etc.) composition, all as defined herein, may be a neuroregenerative or neurodegeneration regulator/modulator/inhibitor compound, bioactive carrier or composition which has demonstrated the ability to induce neuroregeneration and/or prevention, decrease or suppression of neuron degeneration in vitro and/or ex-vivo and/or in vivo.

[0819] In one aspect, the present disclosure thus provides:
[0820] a method of inducing or promoting or enhancing mesenchymal stem cell, progenitor neuronal cell (at any stage of differentiation of the neuronal cell lineage) differentiation, the method comprising administering to the cell an effective amount of at least one (modified) cyclic GFR-binding compound, at least one functionalised bioactive carrier, or at least one pharmaceutical composition, all as defined herein;
[0821] a method of inducing or promoting or enhancing or controlling or regulating neuron regeneration/formation, the method comprising administering to a mesenchymal stem cell or to a progenitor neuronal cell at any stage of differentiation of the neuronal cell lineage or to a mature neuron, an effective amount of at least one (modified) cyclic GFR-binding compound, at least one functionalised bioactive carrier, or at least one pharmaceutical composition, all as defined herein;
[0822] a method of inducing and/or promoting and/or enhancing neuronal cell maturation, the method comprising administering to a differentiated neuronal cell or to a mature neuronal cell an effective amount of at least one (modified) cyclic GFR-binding compound, at least one functionalised bioactive carrier, or at least one pharmaceutical composition, all as defined herein;
[0823] an effective amount of at least one (modified) cyclic GFR-binding compound, at least one functionalised bioactive carrier, or at least one pharmaceutical composition, all as defined herein for use in a method of inducing or promoting or enhancing mesenchymal stem cell or progenitor neuronal cell (at any stage of differentiation of the neuronal cell lineage) differentiation;
[0824] an effective amount of at least one (modified) cyclic GFR-binding compound, at least one functionalised bioactive carrier, or at least one pharmaceutical composition, all as defined herein for use in a method of inducing or promoting or enhancing or controlling or regulating neuron regeneration/formation;
[0825] an effective amount of at least one (modified) cyclic GFR-binding compound, at least one functionalised bioactive carrier, or at least one pharmaceutical composition, all as defined herein for use in a method of inducing and/or promoting and/or enhancing neuronal cell maturation.

[0826] In particular, medical applications which may result from the mediation of type I and II growth factor receptors by a cyclic GFR-binding compound, functionalised bioactive carrier, or pharmaceutical (therapeutic, dermatologic, ophthalmologic, diagnostic, etc.) composition, all as defined herein, include, but are not limited to, enhancing/promoting eye retina cell regeneration and/or treating and/or preventing and/or decreasing or suppressing eye retina cell degeneration-related conditions or diseases.

[0827] Eye-related diseases or disorders in which the present invention may thus be useful include, but are not limited to, Focal chorioretinal inflammation Focal such chorioretinitis, choroiditis, retinitis and retinochoroiditis, Disseminated chorioretinal inflammation, Posterior cyclitis, Harada's disease, Chorioretinal scars such as Macula scars of posterior pole and Solar retinopathy, Choroidal degeneration such as Atrophy and Sclerosis, Hereditary choroidal dystrophy such as Choroideremia, Gyrate atrophy, Choroidal haemorrhage, Choroidal detachment, Chorioretinitis, Retinal detachment, Retinoschisis, Retinal vascular occlusions, Hypertensive retinopathy, Diabetic retinopathy, Retinopathy, Retinopathy of prematurity, Age-related macular degeneration, Macular degeneration, Epiretinal membrane, Peripheral retinal degeneration, Hereditary retinal dystrophy, Retinitis pigmentosa, Retinal haemorrhage, Central serous retinopathy, Retinal detachment and Macular edema.

[0828] In one example, a cyclic GFR-binding compound, functionalised bioactive carrier, or pharmaceutical (therapeutic, dermatologic, ophthalmologic, diagnostic, etc.) composition, all as defined herein, may be an eye tissue-regenerative or eye tissue-degeneration regulator/modulator/inhibitor compound, bioactive carrier or composition which has demonstrated the ability to induce eye retina cell regeneration and/or prevent and/or decrease or suppress eye retina cell degeneration in vitro and/or ex-vivo and/or in vivo.

[0829] In one aspect, the present disclosure thus provides:
[0830] a method of inducing or promoting or enhancing mesenchymal stem cell, progenitor eye retina cell (at any stage of differentiation of the retinal cell lineage) differentiation, the method comprising administering to the cell an effective amount of at least one (modified) cyclic GFR-binding compound, at least one functionalised bioactive carrier, or at least one pharmaceutical composition, all as defined herein;
[0831] a method of inducing or promoting or enhancing or controlling or regulating eye retina cell regeneration/formation, the method comprising administering to a mesenchymal stem cell or to a progenitor eye retina cell at any stage of differentiation of the retinal cell lineage or to a mature eye retina cell, an effective amount of at least one (modified) cyclic GFR-binding compound, at least one functionalised bioactive carrier, or at least one pharmaceutical composition, all as defined herein;
[0832] a method of inducing and/or promoting and/or enhancing eye retina cell maturation, the method comprising administering to a differentiated eye retina cell or to a mature eye retina cell an effective amount of at least one (modified) cyclic GFR-binding compound, at least one functionalised bioactive carrier, or at least one pharmaceutical composition, all as defined herein;
[0833] an effective amount of at least one (modified) cyclic GFR-binding compound, at least one functionalised bioactive carrier, or at least one pharmaceutical composition, all as defined herein for use in a method of inducing or promoting or enhancing mesenchymal stem cell or progenitor eye retina cell (at any stage of differentiation of the retinal cell lineage) differentiation;
[0834] an effective amount of at least one (modified) cyclic GFR-binding compound, at least one functionalised bioactive carrier, or at least one pharmaceutical composition, all as defined herein for use in a method of inducing or promoting or enhancing or controlling or regulating eye retina cell regeneration/formation;
[0835] an effective amount of at least one (modified) cyclic GFR-binding compound, at least one functionalised bioactive carrier, or at least one pharmaceutical composition, all as defined herein for use in a method of inducing and/or promoting and/or enhancing eye retina cell maturation.

[0836] In particular, medical applications which may result from the mediation of type I and II growth factor receptors by a cyclic GFR-binding compound, functionalised bioactive carrier, or pharmaceutical (therapeutic, dermatologic, ophthalmologic, diagnostic, etc.) composition, all as defined herein, include, but are not limited to, enhancing/promoting renal functions such as enhancing/improving waste removal, body's fluid balance control and electrolytes balance control and/or preventing/treating kidneys failure and/or chronic kidney disease (CKD) and/or renal fibrosis.

[0837] In one example, a cyclic GFR-binding compound, functionalised bioactive carrier, or pharmaceutical (therapeutic, dermatologic, ophthalmologic, diagnostic, etc.) composition, all as defined herein, may be a kidneys-function enhancing compound, bioactive carrier or composition which has demonstrated the ability to promote/improve kidneys functions and/or preventing/treating kidneys failure and/or chronic kidney disease (CKD) and/or renal fibrosis in vitro and/or ex-vivo and/or in vivo.

[0838] In one aspect, the present disclosure thus provides:
[0839] a method of inducing or promoting or enhancing mesenchymal stem cell, progenitor renal cell (at any stage of differentiation of the renal cell lineage) differentiation, the method comprising administering to the cell an effective amount of at least one (modified) cyclic GFR-binding compound, at least one functionalised bioactive carrier, or at least one pharmaceutical composition, all as defined herein;
[0840] a method of inducing or promoting or enhancing or controlling or regulating renal cell regeneration/formation, the method comprising administering to a mesenchymal stem cell or to a progenitor renal cell at any stage of differentiation of the renal cell lineage or to a mature renal cell, an effective amount of at least one (modified) cyclic GFR-binding compound, at least one functionalised bioactive carrier, or at least one pharmaceutical composition, all as defined herein;
[0841] a method of inducing and/or promoting and/or enhancing renal cell maturation, the method comprising administering to a differentiated renal cell or to a mature renal cell an effective amount of at least one (modified) cyclic GFR-binding compound, at least one functionalised bioactive carrier, or at least one pharmaceutical composition, all as defined herein;
[0842] an effective amount of at least one (modified) cyclic GFR-binding compound, at least one functionalised bioactive carrier, or at least one pharmaceutical composition, all as defined herein for use in a method of inducing or promoting or enhancing mesenchymal stem cell or progenitor renal cell (at any stage of differentiation of the renal cell lineage) differentiation;
[0843] an effective amount of at least one (modified) cyclic GFR-binding compound, at least one functionalised bioactive carrier, or at least one pharmaceutical composition, all as defined herein for use in a method of inducing or promoting or enhancing or controlling or regulating renal cell regeneration/formation;
[0844] an effective amount of at least one (modified) cyclic GFR-binding compound, at least one functionalised bioactive carrier, or at least one pharmaceutical composition, all as defined herein for use in a method of inducing and/or promoting and/or enhancing renal cell maturation.

[0845] In particular, medical applications which may result from the mediation of type I and II growth factor receptors by a cyclic GFR-binding compound, functionalised bioactive carrier, or pharmaceutical (therapeutic, dermatologic, ophthalmologic, diagnostic, etc.) composition, all as defined herein, include, but are not limited to, enhancing/promoting fibrous tissue formation and tendon and ligament regeneration and/or preventing and/or decreasing or suppressing tendon/ligament cell degeneration.

[0846] In one example, a cyclic GFR-binding compound, functionalised bioactive carrier, or pharmaceutical (therapeutic, dermatologic, ophthalmologic, diagnostic, etc.) composition, all as defined herein, may be a fibrous tissue formation promoting compound, bioactive carrier or composition which has demonstrated the ability to induce fibrous tissue formation in vitro and/or ex-vivo and/or in vivo.

[0847] In one aspect, the present disclosure thus provides:
[0848] a method of inducing or promoting or enhancing mesenchymal stem cell, progenitor tendon/ligament cell (at any stage of differentiation of the T/L cell lineage) differentiation, the method comprising administering to the cell an effective amount of at least one (modified) cyclic GFR-binding compound, at least one functionalised bioactive carrier, or at least one pharmaceutical composition, all as defined herein;
[0849] a method of inducing or promoting or enhancing or controlling or regulating tendon/ligament cell regeneration/formation, the method comprising administering to a mesenchymal stem cell or to a progenitor tendon/ligament cell at any stage of differentiation of the T/L cell lineage or to a mature tendon/ligament cell, an effective amount of at least one (modified) cyclic GFR-binding compound, at least one functionalised bioactive carrier, or at least one pharmaceutical composition, all as defined herein;
[0850] a method of inducing and/or promoting and/or enhancing tendon/ligament cell maturation, the method comprising administering to a differentiated tendon/ligament cell or to a mature tendon/ligament cell an effective amount of at least one (modified) cyclic GFR-binding compound, at least one functionalised bioactive carrier, or at least one pharmaceutical composition, all as defined herein;
[0851] an effective amount of at least one (modified) cyclic GFR-binding compound, at least one functionalised bioactive carrier, or at least one pharmaceutical composition, all as defined herein for use in a method of inducing or promoting or enhancing mesenchymal stem cell or progenitor tendon/ligament cell (at any stage of differentiation of the T/L cell lineage) differentiation;
[0852] an effective amount of at least one (modified) cyclic GFR-binding compound, at least one functionalised bioactive carrier, or at least one pharmaceutical composition, all as defined herein for use in a method of inducing or promoting or enhancing or controlling or regulating tendon/ligament cell regeneration/formation;
[0853] an effective amount of at least one (modified) cyclic GFR-binding compound, at least one functionalised bioactive carrier, or at least one pharmaceutical composition, all as defined herein for use in a method of inducing and/or promoting and/or enhancing tendon/ligament cell maturation.

[0854] In particular, medical applications which may result from the mediation of type I and II growth factor receptors by a cyclic GFR-binding compound, functionalised bioactive carrier, or pharmaceutical (therapeutic, dermatologic, ophthalmologic, diagnostic, etc.) composition, all as defined herein, include, but are not limited to, hair follicle tissue regeneration and formation (hair growth), hair follicle stem cell activation (loss of quiescence state) and/or preventing/treating alopecia areata, alopecia totalis, alopecia universalis, androgenic alopecia (male pattern baldness), telogen effluvium, anagen effluvium or chemotherapy-induced alopecia.

[0855] In one example, a cyclic GFR-binding compound, functionalised bioactive carrier, or pharmaceutical (therapeutic, dermatologic, ophthalmologic, diagnostic, etc.) composition, all as defined herein, may be a hair follicle growth activation promoting compound, bioactive carrier or composition which has demonstrated the ability to induce hair follicle formation and/or hair follicle stem cell activation in vitro and/or ex-vivo and/or in vivo.

[0856] In one aspect, the present disclosure thus provides:
[0857] a method of inducing or promoting or enhancing mesenchymal stem cell, progenitor hair follicle cell (at any stage of differentiation of the hair follicle cell lineage) differentiation, the method comprising administering to the cell an effective amount of at least one (modified) cyclic GFR-binding compound, at least one functionalised bioactive carrier, or at least one pharmaceutical composition, all as defined herein;
[0858] a method of inducing or promoting or enhancing or controlling or regulating hair follicle cell regeneration/formation, the method comprising administering to a mesenchymal stem cell or to a progenitor hair follicle cell at any stage of differentiation of the hair follicle cell lineage or to a mature hair follicle cell, an effective amount of at least one (modified) cyclic GFR-binding compound, at least one functionalised bioactive carrier, or at least one pharmaceutical composition, all as defined herein;
[0859] a method of inducing and/or promoting and/or enhancing hair follicle cell maturation, the method comprising administering to a differentiated hair follicle cell or to a mature hair follicle cell an effective amount of at least one (modified) cyclic GFR-binding compound, at least one functionalised bioactive carrier, or at least one pharmaceutical composition, all as defined herein;
[0860] a method of activating hair follicle stem cells, the method comprising administering to a quiescent hair follicle stem cell an effective amount of at least one (modified) cyclic GFR-binding compound, at least one functionalised bioactive carrier, or at least one pharmaceutical composition, all as defined herein;
[0861] an effective amount of at least one (modified) cyclic GFR-binding compound, at least one functionalised bioactive carrier, or at least one pharmaceutical composition, all as defined herein for use in a method of inducing or promoting or enhancing mesenchymal stem cell or progenitor hair follicle cell (at any stage of differentiation of the hair follicle cell lineage) differentiation;
[0862] an effective amount of at least one (modified) cyclic GFR-binding compound, at least one functionalised bioactive carrier, or at least one pharmaceutical composition, all as defined herein for use in a method of inducing or promoting or enhancing or controlling or regulating hair follicle cell regeneration/formation;
[0863] an effective amount of at least one (modified) cyclic GFR-binding compound, at least one functionalised bioactive carrier, or at least one pharmaceutical composition, all as defined herein for use in a method of inducing and/or promoting and/or enhancing tendon/ligament cell maturation;
[0864] an effective amount of at least one (modified) cyclic GFR-binding compound, at least one functionalised bioactive carrier, or at least one pharmaceutical composition, all as defined herein for use in a method of activating hair follicle stem cells.

[0865] In particular, medical applications which may result from the mediation of type I and II growth factor receptors by a cyclic GFR-binding compound, functionalised bioactive carrier, or pharmaceutical (therapeutic, dermatologic, ophthalmologic, diagnostic, etc.) composition, all as defined herein, include, but are not limited to, enhancing tissue closure.

[0866] In one example, a cyclic GFR-binding compound, functionalised bioactive carrier, or pharmaceutical (therapeutic, dermatologic, ophthalmologic, diagnostic, etc.) composition, all as defined herein, may be a tissue-closure-promoting compound or biomaterial which has demonstrated the ability to induce tissue closure in vitro and/or ex-vivo and/or in vivo.

[0867] In one aspect, the present disclosure thus provides:
[0868] a method of inducing or promoting or enhancing tissue closure, the method comprising administering to an incised/opened tissue an effective amount of at least one (modified) cyclic GFR-binding compound, at least one functionalised bioactive carrier, or at least one pharmaceutical composition, all as defined herein;
[0869] an effective amount of at least one (modified) cyclic GFR-binding compound, at least one functionalised bioactive carrier, or at least one pharmaceutical composition, all as defined herein for use in a method of inducing or promoting or enhancing tissue closure.

[0870] In particular, medical applications which may result from the mediation of type I and II growth factor receptors by a cyclic GFR-binding compound, functionalised bioactive carrier, or pharmaceutical (therapeutic, dermatologic, ophthalmologic, diagnostic, etc.) composition, all as defined herein, include, but are not limited to, enhancing/promoting female fertility and/or preventing and/or decreasing or suppressing female infertility.

[0871] In one example, a cyclic GFR-binding compound, functionalised bioactive carrier, or pharmaceutical (therapeutic, dermatologic, ophthalmologic, diagnostic, etc.) composition, all as defined herein, may be a female fertility enhancing or a female infertility regulator/modulator/inhibitor compound, bioactive carrier or composition which has demonstrated the ability to enhance/promote female fertility and/or prevent and/or decrease or suppress female infertility in vitro and/or ex-vivo and/or in vivo.

[0872] In one aspect, the present disclosure thus provides:
[0873] a method of inducing or promoting or enhancing mesenchymal stem cell, progenitor ovarian cell (at any stage of differentiation of the reproduction system lineage) differentiation, the method comprising administering to the cell an effective amount of at least one (modified) cyclic GFR-binding compound, at least one functionalised bioactive carrier, or at least one pharmaceutical composition, all as defined herein;
[0874] a method of inducing or promoting or enhancing or controlling or regulating ovarian cell regeneration/formation, the method comprising administering to a mesenchymal stem cell or to a progenitor ovarian cell at any stage of differentiation of the reproduction system lineage or to a mature ovarian cell, an effective amount of at least one (modified) cyclic GFR-binding compound, at least one functionalised bioactive carrier, or at least one pharmaceutical composition, all as defined herein;
[0875] a method of inducing and/or promoting and/or enhancing ovarian cell maturation, the method comprising administering to a differentiated ovarian cell or to a mature ovarian cell an effective amount of at least one (modified) cyclic GFR-binding compound, at least one functionalised bioactive carrier, or at least one pharmaceutical composition, all as defined herein;
[0876] an effective amount of at least one (modified) cyclic GFR-binding compound, at least one functionalised bioactive carrier, or at least one pharmaceutical composition, all as defined herein for use in a method of inducing or promoting or enhancing mesenchymal stem cell or progenitor ovarian cell (at any stage of differentiation of the reproduction system lineage) differentiation;
[0877] an effective amount of at least one (modified) cyclic GFR-binding compound, at least one functionalised bioactive carrier, or at least one pharmaceutical composition, all as defined herein for use in a method of inducing or promoting or enhancing or controlling or regulating ovarian cell regeneration/formation;
[0878] an effective amount of at least one (modified) cyclic GFR-binding compound, at least one functionalised bioactive carrier, or at least one pharmaceutical composition, all as defined herein for use in a method of inducing and/or promoting and/or enhancing ovarian cell maturation.

[0879] In particular, medical applications which may result from the mediation of type I and II growth factor receptors by a (modified) cyclic GFR-binding compound, functionalised bioactive carrier, or pharmaceutical (therapeutic, dermatologic, ophthalmologic, diagnostic, etc.) composition, all as defined herein, include, but are not limited to, enhancing of myogenesis, inducing muscle tissue formation, reinforcing muscle tissues, inducing myocyte maturation, repairing damaged muscles, preventing muscle tissue degeneration or damages, and/or protecting a subject from one or more muscle tissue-related diseases, disorders, conditions or pathologies.

[0880] In one example, a (modified) cyclic GFR-binding compound, functionalised bioactive carrier, or pharmaceutical (therapeutic, dermatologic, ophthalmologic, diagnostic, etc.) composition, all as defined herein, may thus be an myoinductive compound, bioactive carrier or composition which has demonstrated an ability to induce muscle tissue formation in vitro and/or ex-vivo and/or in vivo.

[0881] In one aspect, the present disclosure thus provides:
[0882] a method of inducing or promoting or enhancing mesenchymal stem cell, progenitor myoblast (at any stage of differentiation of the muscle cell lineage) differentiation, the method comprising administering to the cell an effective amount of at least one (modified) cyclic GFR-binding compound, at least one functionalised bioactive carrier, or at least one pharmaceutical composition, all as defined herein;
[0883] a method of inducing or promoting or enhancing or controlling or regulating muscle tissue regeneration/formation, the method comprising administering to a mesenchymal stem cell or to a progenitor myoblast at any stage of differentiation of the muscle cell lineage or to a mature myoblast, an effective amount of at least one (modified) cyclic GFR-binding compound, at least one functionalised bioactive carrier, or at least one pharmaceutical composition, all as defined herein;
[0884] a method of inducing and/or promoting and/or enhancing myocyte maturation, the method comprising administering to a differentiated myoblast or to a mature myoblast (e.g. an myocyte) an effective amount of at least one (modified) cyclic GFR-binding compound, at least one functionalised bioactive carrier, or at least one pharmaceutical composition, all as defined herein;
[0885] an effective amount of at least one (modified) cyclic GFR-binding compound, at least one functionalised bioactive carrier, or at least one pharmaceutical composition, all as defined herein for use in a method of inducing or promoting or enhancing mesenchymal stem cell or progenitor myoblast (at any stage of differentiation of the muscle cell lineage) differentiation;
[0886] an effective amount of at least one (modified) cyclic GFR-binding compound, at least one functionalised bioactive carrier, or at least one pharmaceutical composition, all as defined herein for use in a method of inducing or promoting or enhancing or controlling or regulating muscle tissue regeneration/formation;
[0887] an effective amount of at least one (modified) cyclic GFR-binding compound, at least one functionalised bioactive carrier, or at least one pharmaceutical composition, all as defined herein for use in a method of inducing and/or promoting and/or enhancing myoblast maturation.

[0888] In particular, medical applications which may result from the mediation of type I and II growth factor receptors by a (modified) cyclic GFR-binding compound, functionalised bioactive carrier, or pharmaceutical (therapeutic, dermatologic, ophthalmologic, diagnostic, etc.) composition, all as defined herein, include, but are not limited to, enhancing blood tissue regeneration, inducing blood cell differentiation, or protecting a patient from a blood cell degeneration-related disease, condition, disorder, or pathology.

[0889] In one example, a (modified) cyclic GFR-binding compound, functionalised bioactive carrier, or pharmaceutical (therapeutic, dermatologic, ophthalmologic, diagnostic, etc.) composition, all as defined herein, may thus be a blood cell degeneration inhibitor, bioactive carrier or composition which has demonstrated an ability to induce blood cell formation in vitro and/or ex-vivo and/or in vivo.

[0890] In one aspect, the present disclosure thus provides:
[0891] a method of inducing or promoting or enhancing mesenchymal stem cell, progenitor blood cell (at any stage of differentiation of the Osteoblast cell lineage) differentiation, the method comprising administering to the cell an effective amount of at least one (modified) cyclic GFR-binding compound, at least one functionalised bioactive carrier, or at least one pharmaceutical composition, all as defined herein;
[0892] a method of inducing or promoting or enhancing or controlling or regulating blood cell regeneration/formation, the method comprising administering to a mesenchymal stem cell or to a progenitor blood cell at any stage of differentiation of the blood cell lineage or to a mature blood cell, an effective amount of at least one (modified) cyclic GFR-binding compound, at least one functionalised bioactive carrier, or at least one pharmaceutical composition, all as defined herein;
[0893] a method of inducing and/or promoting and/or enhancing blood cell maturation, the method comprising administering to a differentiated blood cell or to a mature blood cell (e.g. a mature red blood cell) an effective amount of at least one (modified) cyclic GFR-binding compound, at least one functionalised bioactive carrier, or at least one pharmaceutical composition, all as defined herein;
[0894] an effective amount of at least one (modified) cyclic GFR-binding compound, at least one functionalised bioactive carrier, or at least one pharmaceutical composition, all as defined herein for use in a method of inducing or promoting or enhancing mesenchymal stem cell or progenitor blood cell (at any stage of differentiation of the blood cell lineage) differentiation;
[0895] an effective amount of at least one (modified) cyclic GFR-binding compound, at least one functionalised bioactive carrier, or at least one pharmaceutical composition, all as defined herein for use in a method of inducing or promoting or enhancing or controlling or regulating blood cell regeneration/formation;
[0896] an effective amount of at least one (modified) cyclic GFR-binding compound, at least one functionalised bioactive carrier, or at least one pharmaceutical composition, all as defined herein for use in a method of inducing and/or promoting and/or enhancing blood cell maturation.

[0897] In particular, medical applications which may result from the mediation of type I and II growth factor receptors by a (modified) cyclic GFR-binding compound, functionalised bioactive carrier, or pharmaceutical (therapeutic, dermatologic, ophthalmologic, diagnostic, etc.) composition, all as defined herein, include, but are not limited to, enhancing of lung tissue regeneration, inducing lung cell differentiation, or protecting a patient from a lung cell degeneration-related disease, condition, disorder, or pathology.

[0898] In one example, a (modified) cyclic GFR-binding compound, functionalised bioactive carrier, or pharmaceutical (therapeutic, dermatologic, ophthalmologic, diagnostic, etc.) composition, all as defined herein, may thus be a lung cell degeneration inhibitor, bioactive carrier or composition which has demonstrated an ability to induce lung cell formation in vitro and/or ex-vivo and/or in vivo.

[0899] In one aspect, the present disclosure thus provides:
[0900] a method of inducing or promoting or enhancing mesenchymal stem cell, progenitor lung cell (at any stage of differentiation of the Osteoblast cell lineage) differentiation, the method comprising administering to the cell an effective amount of at least one (modified) cyclic GFR-binding compound, at least one functionalised bioactive carrier, or at least one pharmaceutical composition, all as defined herein;
[0901] a method of inducing or promoting or enhancing or controlling or regulating lung cell regeneration/formation, the method comprising administering to a mesenchymal stem cell or to a progenitor lung cell at any stage of differentiation of the lung cell lineage or to a mature lung cell, an effective amount of at least one (modified) cyclic GFR-binding compound, at least one functionalised bioactive carrier, or at least one pharmaceutical composition, all as defined herein;
[0902] a method of inducing and/or promoting and/or enhancing lung cell maturation, the method comprising administering to a differentiated lung cell or to a mature lung cell an effective amount of at least one (modified) cyclic GFR-binding compound, at least one functionalised bioactive carrier, or at least one pharmaceutical composition, all as defined herein;
[0903] an effective amount of at least one (modified) cyclic GFR-binding compound, at least one functionalised bioactive carrier, or at least one pharmaceutical composition, all as defined herein for use in a method of inducing or promoting or enhancing mesenchymal stem cell or progenitor lung cell (at any stage of differentiation of the lung cell lineage) differentiation;
[0904] an effective amount of at least one (modified) cyclic GFR-binding compound, at least one functionalised bioactive carrier, or at least one pharmaceutical composition, all as defined herein for use in a method of inducing or promoting or enhancing or controlling or regulating lung cell regeneration/formation;
[0905] an effective amount of at least one (modified) cyclic GFR-binding compound, at least one functionalised bioactive carrier, or at least one pharmaceutical composition, all as defined herein for use in a method of inducing and/or promoting and/or enhancing lung cell maturation.

[0906] In particular, medical applications which may result from the mediation of type I and II growth factor receptors by a (modified) cyclic GFR-binding compound, functionalised bioactive carrier, or pharmaceutical (therapeutic, dermatologic, ophthalmologic, diagnostic, etc.) composition, all as defined herein, include, but are not limited to, enhancing adipose tissue regeneration, inducing adipocyte differentiation, or protecting a patient from a adipose tissue degeneration-related disease, condition, disorder, or pathology.

[0907] In one example, a (modified) cyclic GFR-binding compound, functionalised bioactive carrier, or pharmaceutical (therapeutic, dermatologic, ophthalmologic, diagnostic, etc.) composition, all as defined herein, may thus be an adipose tissue degeneration inhibitor, bioactive carrier or composition which has demonstrated an ability to induce adipose tissue formation in vitro and/or ex-vivo and/or in vivo.

[0908] In one aspect, the present disclosure thus provides:
[0909] a method of inducing or promoting or enhancing mesenchymal stem cell, progenitor adipocyte (at any stage of differentiation of the Osteoblast cell lineage) differentiation, the method comprising administering to the cell an effective amount of at least one (modified) cyclic GFR-binding compound, at least one functionalised bioactive carrier, or at least one pharmaceutical composition, all as defined herein;
[0910] a method of inducing or promoting or enhancing or controlling or regulating adipose tissue regeneration/formation, the method comprising administering to a mesenchymal stem cell or to a progenitor adipocyte at any stage of differentiation of the adipocyte lineage or to a mature adipocyte, an effective amount of at least one (modified) cyclic GFR-binding compound, at least one functionalised bioactive carrier, or at least one pharmaceutical composition, all as defined herein;
[0911] a method of inducing and/or promoting and/or enhancing adipocyte maturation, the method comprising administering to a differentiated adipocyte or to a mature adipocyte an effective amount of at least one (modified) cyclic GFR-binding compound, at least one functionalised bioactive carrier, or at least one pharmaceutical composition, all as defined herein;
[0912] an effective amount of at least one (modified) cyclic GFR-binding compound, at least one functionalised bioactive carrier, or at least one pharmaceutical composition, all as defined herein for use in a method of inducing or promoting or enhancing mesenchymal stem cell or progenitor adipocyte (at any stage of differentiation of the adipocyte lineage) differentiation;
[0913] an effective amount of at least one (modified) cyclic GFR-binding compound, at least one functionalised bioactive carrier, or at least one pharmaceutical composition, all as defined herein for use in a method of inducing or promoting or enhancing or controlling or regulating adipose tissue regeneration/formation;
[0914] an effective amount of at least one (modified) cyclic GFR-binding compound, at least one functionalised bioactive carrier, or at least one pharmaceutical composition, all as defined herein for use in a method of inducing and/or promoting and/or enhancing adipocyte maturation.

[0915] Protected from a disease, condition, disorder or pathology refers to the treatment of the underlying cause of the disease, condition, disorder or pathology as well as reducing the symptoms of the disease, condition, disorder or pathology; and/or reducing the occurrence of the disease, condition, disorder or pathology; and/or reducing the severity of the disease, condition, disorder or pathology. Protecting a patient can refer to the ability of a therapeutic composition of the present invention, when administered to a patient, to prevent a disease, condition, disorder or pathology from occurring and/or to cure or to alleviate disease, condition, disorder or pathology symptoms, signs or causes. As such, to protect a patient from a disease, condition, disorder or pathology includes both preventing disease, condition, disorder or pathology occurrence (prophylactic treatment) and treating a patient that has a disease, condition, disorder or pathology or that is experiencing initial symptoms or later stage symptoms of a disease, condition, disorder or pathology (therapeutic treatment).

[0916] Treating: As used herein, unless indicated otherwise or contradictory in context, the term “treating” or “treatment” refers to partially or completely alleviating, ameliorating, improving, relieving, delaying onset of, inhibiting progression of, reducing severity of, and/or reducing incidence of one or more symptoms or features of a particular disease, disorder, pathology and/or condition. Treatment may be administered to a subject who does not exhibit signs of a disease, disorder, and/or condition and/or to a subject who exhibits only early signs of a disease, disorder, pathology and/or condition for the purpose of decreasing the risk of developing pathology associated with the disease, disorder, and/or condition.

[0917] Preventing: As used herein, unless indicated otherwise or contradictory in context, the term “preventing” refers to partially or completely delaying onset of an infection, disease, disorder and/or condition; partially or completely delaying onset of one or more symptoms, features, or clinical manifestations of a particular infection, disease, disorder, and/or condition; partially or completely delaying onset of one or more symptoms, features, or manifestations of a particular infection, disease, disorder, and/or condition; partially or completely delaying progression from an infection, a particular disease, disorder and/or condition; and/or decreasing the risk of developing pathology associated with the infection, the disease, disorder, and/or condition.

[0918] Disease: As used herein, unless indicated otherwise or contradictory in context, the term “disease” refers to any deviation from the normal health of a patient and includes a state when disease symptoms are present, as well as conditions in which a deviation has occurred, but symptoms are not yet manifested. The same applies to “condition”, “disorder” and “pathology”.

[0919] In one aspect, the present disclosure provides methods of determining the effectiveness of a (modified) cyclic GFR-binding compound, a functionalised bioactive carrier or a pharmaceutical composition as defined herein for inducing cell differentiation, or inducing, promoting, enhancing, controlling or regulating tissue regeneration/formation in-vitro, ex-vivo and in-vivo comprising the administration of said (modified) cyclic GFR-binding compound, a functionalised bioactive carrier or a pharmaceutical composition to a cell; the measurement of the expression of specific differentiation markers as defined herein in the cell; the comparison of the expression of said specific differentiation markers in the cell to the expression of said specific differentiation markers in a cell treated with a reference (or control) functionalised bioactive carrier, compound or solvent; and determining the effectiveness of the (modified) cyclic GFR-binding compound, a functionalised bioactive carrier or a pharmaceutical composition relative to the reference pharmaceutical association or compound.

[0920] In one aspect, the present disclosure provides methods to activate, promote, support, improve, or increase the activity of a growth factor receptor present in, on the surface of a mesenchymal stem cell or progenitor cell (at any stage of differentiation thereof) such that said cell may undergo efficient cell differentiation.

[0921] In one aspect, the present disclosure provides methods of identifying, diagnosing, and optionally classifying subjects on these bases, which may include clinical diagnosis, biomarker levels, and other methods known in the art.

### XVII. Wound Healing Applications

[0922] Specific applications of the invention in dermatology relate to wound healing and skin repair.

[0923] Thus, dermatological applications which may result from the mediation of type I and II growth factor receptors by a compound, functionalised bioactive carrier, or composition of the invention include, but are not limited to, enhancing wound healing, skin repair and cellular migration.

[0924] Skin repair: In the present description and unless otherwise indicated, the term “skin repair” means dermal and epidermal cells regeneration, collagen and other skin protein synthesis by epithelial cells.

[0925] Cellular migration: In the present description and unless otherwise indicated, the term “cellular migration” means a central process in the development and maintenance of multicellular organisms. Tissue formation during embryonic development, wound healing and immune responses all require the orchestrated movement of cells in particular directions to specific locations. The cells involved in cellular migration include the cells of the epithelial and dermal cell lineages forming the connective tissue i.e. the fibroblasts, fibrocytes, myofibroblasts, adipocytes, synoviocytes, macrophages, histiocytes, granulocytes, plasmocytes and mastocytes.

[0926] In one example, a (modified) cyclic GFR-binding compound, functionalised bioactive carrier, or pharmaceutical (therapeutic, dermatologic, ophthalmologic, diagnostic, etc.) composition, all as defined herein, may be a wound-healing-promoting compound, bioactive carrier, or composition which has demonstrated the ability to induce wound healing, skin repair and/or cellular migration in vitro, ex-vivo and/or in vivo.

[0927] In one aspect, the present disclosure thus provides:
[0928] a method of inducing or promoting or enhancing mesenchymal stem cell, progenitor epithelial cell (at any stage of differentiation of the epithelial and dermal cell lineage) differentiation, the method comprising administering to the cell an effective amount of at least one (modified) cyclic GFR-binding compound, at least one functionalised bioactive carrier, or at least one pharmaceutical composition of the invention;
[0929] a method of inducing or promoting or enhancing or controlling or regulating skin tissue regeneration/formation and/or tubular formation, the method comprising administering to a mesenchymal stem cell or to a progenitor epithelial cell at any stage of differentiation of the epithelial and dermal cell lineage or to a mature epithelial cell, an effective amount of at least one (modified) cyclic GFR-binding compound, at least one functionalised bioactive carrier, or at least one pharmaceutical composition of the invention;
[0930] a method of inducing and/or promoting and/or enhancing cell motility or single/collective epithelial cell migration, the method comprising administering to a mesenchymal stem cell or to a progenitor epithelial cell at any stage of differentiation of the epithelial and dermal cell lineage or to a mature epithelial cell an effective amount of at least one (modified) cyclic GFR-binding compound, at least one functionalised bioactive carrier, or at least one pharmaceutical composition of the invention;
[0931] a method of inducing and/or promoting and/or enhancing epithelial cell maturation, the method comprising administering to a differentiated epithelial cell or to a mature epithelial cell an effective amount of at least one (modified) cyclic GFR-binding compound, at least one functionalised bioactive carrier, or at least one pharmaceutical composition of the invention;
[0932] an effective amount of at least one (modified) cyclic GFR-binding compound, at least one functionalised bioactive carrier, or at least one pharmaceutical composition of the invention for use in a method of inducing or promoting or enhancing mesenchymal stem cell, progenitor epithelial cell (at any stage of differentiation of the epithelial and dermal cell lineage) differentiation;
[0933] an effective amount of at least one (modified) cyclic GFR-binding compound, at least one functionalised bioactive carrier, or at least one pharmaceutical composition of the invention for use in a method of inducing or promoting or enhancing or controlling or regulating skin tissue regeneration/formation;
[0934] an effective amount of at least one (modified) cyclic GFR-binding compound, at least one functionalised bioactive carrier, or at least one pharmaceutical composition of the invention for use in a method of inducing and/or promoting and/or enhancing cell motility or single/collective epithelial cell migration,
[0935] an effective amount of at least one (modified) cyclic GFR-binding compound, at least one functionalised bioactive carrier, or at least one pharmaceutical composition of the invention for use in a method of inducing and/or promoting and/or enhancing epithelial cell maturation.

### XVIII. Cosmetic Applications

[0936] Skin ageing is typically associated with a deregulation of the metabolism of cutaneous cells characterized by a diminishing of the proliferation of keratinocytes, a deregulation of the differentiation of keratinocytes, an accumulation of dead cells, and a diminishing of the innervation of the skin.

[0937] Cosmetic, non-therapeutic, applications which may result from the mediation of type I and II growth factor receptors by a cyclic GFR-binding compound, functionalised bioactive carrier, or compositions thereof, all as defined herein, include, but are not limited to, enhancing/promoting skin regeneration, preventing and/or attenuating and/or masking and/or removing wrinkles, firming the skin, preventing and/or decreasing or suppressing skin pigmentation.

[0938] In one example, a cyclic GFR-binding compound, functionalised bioactive carrier, or compositions thereof, all as defined herein, may be an anti-wrinkle/ageing and/or skin-firming and/or skin regeneration-promoting compound, bioactive carrier or composition which has demonstrated the ability to enhance/promote skin cosmetic regeneration, prevent and/or attenuate and/or mask and/or remove wrinkles, firm the skin, prevent and/or decrease or suppress skin pigmentation in vitro and/or in vivo.

[0939] In one aspect, the present disclosure provides a cosmetic or functional food composition comprising at least one cyclic GFR-binding compound or at least one functionalised bioactive carrier, all as defined herein, in combination with at least one suitable cosmetic carrier, preferably suitable for topical application.

[0940] Suitable cosmetic carrier: The terms “suitable cosmetic carrier” used here, mean that the composition or the components of the latter are suitable for use in contact with human skin without undue toxicity, incompatibility, instability, allergic response or their equivalents.

[0941] In one aspect, the present disclosure provides a use of a cyclic GFR-binding compound, or functionalised bioactive carrier, all as defined herein, in cosmetics or as a functional food.

[0942] In one aspect, the present disclosure provides a use of a cyclic GFR-binding compound, functionalised bioactive carrier, or composition thereof, all as defined herein, or a cosmetic or functional food composition as defined herein as an anti-wrinkle/ageing agent. For example, in certain embodiments, the cyclic GFR-binding compound, functionalised bioactive carrier, or composition thereof, all as defined herein, is used as active ingredient to prevent or treat skin-ageing in a cosmetic composition or a functional food composition.

[0943] In one aspect, the present disclosure provides a use of a cyclic GFR-binding compound or functionalised bioactive carrier, all as defined herein, or a cosmetic composition thereof as defined herein in a method of cosmetic care, wherein said method of cosmetic care comprises the administration or the application of between about 0.0001 □g/day to about 5000 mg/day, between about 0.0001 □g/day to about 1000 mg/day, between about 0.0001 □g/day to about 10 mg/day, between about 0.0001 □g/day to about 1 mg/day, or between about 0.0001 □g/day to about 100 □g/day of said compound, bioactive carrier or composition, all being preferred and specifically contemplated for implementing embodiments of the invention.

[0944] In one example, the administration comprises the oral administration of a tablet, capsule, pill, powder, sustained release formulations, solution or suspension containing said cyclic GFR-binding compound or functionalised bioactive carrier, all as defined herein, or cosmetic or functional food compositions thereof as defined herein.

[0945] In one preferred example, said use comprises the topical application of a cyclic GFR-binding compound or functionalised bioactive carrier, all as defined herein, or cosmetic composition thereof as defined herein.

[0946] Suitable formulations for use in cosmetic care treatment include, for instance, the ones described in U.S. Pat. No. 8,497,241 B2, which is hereby incorporated by reference.

[0947] In one example, said cosmetic use of the invention is a non-therapeutic cosmetic use.

[0948] In one aspect, the present disclosure provides a cosmetic care or treatment method in which the cyclic GFR-binding compound, the functionalised bioactive carrier, or the cosmetic composition, all as defined herein, is used via topical application to stimulate the proliferation and/or activity of the fibroblasts.

[0949] For example, in certain embodiments, said cosmetic care method of the invention include treatment of skin ageing, especially unesthetic and/or uncomfortable manifestations of skin ageing, such as slackness of the tissues, loss of firmness of the tissues, the appearance of wrinkles, fine lines, and grooves, and/or for the cosmetic treatment and/or care of stretch marks and/or scars.

[0950] In one example, the cosmetic care method of the invention is preferably for protecting the skin against skin ageing.

[0951] Topical application: In the present description and unless otherwise indicated, the term “topical application” means to apply or spray the composition of the present invention onto the surface of the skin.

[0952] Cosmetic compositions of the invention may comprise other active agents of cosmetic interest especially the conventional agents for anti-ageing compositions especially those chosen from hyaluronic acid, ascorbic acid, retinol, alpha-hydroxy acids (AHAs) and/or ursolic acid.

[0953] In one example, the cosmetic composition of the invention may contain at least one of the following agents:
[0954] an agent that stimulates the flbronectin synthesis, in particular a maize extract;
[0955] an agent that stimulates the laminin synthesis, in particular an extract of malt;
[0956] an agent that stimulates the expression and/or the activity of hyaluronan synthase 2 (HAS2);
[0957] an agent that stimulates the synthesis of lysyl oxidase-like (LOXL);
[0958] an agent that stimulates the synthesis of intracellular ATP;
[0959] an agent that protects the degradation of FGF2.

[0960] cyclic GFR-binding compounds, or functionalised bioactive carrier in their cosmetic applications, optionally in the form of cosmetic compositions, are particularly suitable for protecting the skin against skin ageing that is natural and/or caused by climatic and environmental factors, especially the wind, pollution, UV rays, cigarette smoke and/or physiological factors, especially stress.

[0961] In one aspect, the present disclosure provides a cosmetic care or treatment method, for a subject having need thereof, said method comprising the application, preferably topical application, or administration of a cosmetic composition as defined herein.

[0962] In one example, the subject who has need of the cosmetic care of the invention is a subject chosen from a population having an average age of more than 30 years old, preferably of more than 40 years old, more preferably of more than 50 years old.

### XIX. Hair Treatment Applications

[0963] Hair is subjected to a wide variety of severe stress, for example as a result of environmental influences, such as UV irradiation or weathering, mechanical stresses, such as combing, or various hair treatments, such as washing, drying with hot air, bleaching, coloring, perming, etc., which can lead to hair damage. Said damage includes e.g. dryness, reduced elasticity, brittleness, split ends, dullness, matt appearance, reduced fullness, rough surface and reduced mechanical strength. This leads to impaired combability, reduced shine, increased electrostatic charging, tendency to break and may go as far as hair loss in some cases. The hair wearer feels uneasy. Hair loss may be due to aging as through time, hair naturally tends to gradually thin. Other causes of hair loss include hormonal factors, medical conditions and medications. The most common cause of hair loss is a hereditary condition called male-pattern baldness or female-pattern baldness. In genetically susceptible people, certain sex hormones trigger a particular pattern of permanent hair loss. Most common in men, this type of hair thinning can begin as early as puberty. Hormonal changes and imbalances can also cause temporary hair loss. This could be due to pregnancy, childbirth, discontinuation of birth control pills or the onset of menopause. A variety of medical conditions may also cause hair loss, including, but not limited to, thyroid problems, alopecia areata, and scalp infections. Hair loss may further be caused by drugs used to treat Arthritis, depression, heart problems, high blood pressure, etc.

[0964] Medical or cosmetic applications which may result from the mediation of type I and II growth factor receptors by a (modified) cyclic GFR-binding compound, functionalised bioactive carrier or composition of the invention also include enhancing/promoting hair growth and/or preventing and/or decreasing or suppressing hair loss. Without wishing to be bound to any specific theories, this effect is thought to be achieved through activation of dormant (or quiescent) hair follicle stem cells by displacement of natural binding ligands such as BMP-6, strongly bound to their growth factor receptors.

[0965] In one example, a (modified) cyclic GFR-binding compound, or functionalised bioactive carrier as defined herein may be a hair growth-promoting or a hair loss-regulator/modulator/inhibitor compound or functionalised bioactive carrier which has demonstrated the ability to enhance/promote hair growth and/or prevent and/or decrease or suppress hair loss in vitro, ex-vivo and/or in vivo.

[0966] In one aspect, the present disclosure provides a hair cosmetic or functional food composition comprising at least one (modified) cyclic GFR-binding compound, or at least one functionalised bioactive carrier, all as defined herein, in combination with at least one suitable hair-cosmetic carrier, preferably suitable for topical application.

[0967] Topical applications may be performed by any end-user by, for instance, applying and optionally rubbing the hair scalp with a hair cosmetic composition of the invention e.g. formulated as a shampoo or conditioner.

[0968] In one aspect, the present disclosure provides a hair medical (pharmaceutical, prophylactic, diagnostic, imaging, etc.) composition comprising at least one (modified) cyclic GFR-binding compound, or at least one functionalised bioactive carrier, all as defined herein, in combination with at least one suitable hair-medical carrier, preferably suitable for scalp injection application.

[0969] Scalp injection applications may preferably be performed by experienced end-users such as dermatologists and/or surgeons, preferably in clinical/medical settings in clean or sterile environment. Several subcutaneous injections may be carried out under the scalp where needed and renewed every few weeks, preferably months if required.

[0970] In one aspect, the present invention discloses a use of a (modified) cyclic GFR-binding compound, or a functionalised bioactive carrier as defined herein, in hair cosmetics or as a functional food. In one aspect, the present invention discloses a (modified) cyclic GFR-binding compound, or a functionalised bioactive carrier as defined herein, for use in a hair medical method.

[0971] In one aspect, the present disclosure provides a use of a (modified) cyclic GFR-binding compound, a functionalised bioactive carrier, or a hair cosmetic or functional food composition, all as defined herein, as a hair growth-promoting agent or hair-loss-preventing agent. For example, in certain embodiments, the (modified) cyclic GFR-binding compound, or functionalised bioactive carrier as defined herein, is used as active ingredient to promote (enhance, regulate, modulate, improve) hair growth and/or prevent or treat hair-loss and/or embellish hair in a hair cosmetic composition or a functional food composition. In one aspect, the present disclosure provides a (modified) cyclic GFR-binding compound, a functionalised bioactive carrier, or a hair medical composition, all as defined herein, as a hair growth-promoting agent or hair-loss-preventing agent. For example, in certain embodiments, the (modified) cyclic GFR-binding compound, or functionalised bioactive carrier as defined herein, is used as active ingredient to promote (enhance, regulate, modulate, improve) hair growth and/or prevent or treat hair-loss and/or embellish hair in a hair medical composition.

[0972] In one aspect, the present disclosure provides a use of a (modified) cyclic GFR-binding compound, a functionalised bioactive carrier, or a hair cosmetic composition, all as defined herein, in a method of hair cosmetic care, wherein said method of hair cosmetic care comprises the administration or the application of between about 0.0001 to about 100 □g per day, more specifically between about 0.001 to about 10 □g per day or between about 0.0001 to about 100 □g per day of said compound, bioactive carrier or composition.

[0973] In one example, a (modified) cyclic GFR-binding compound, functionalised bioactive carrier, or hair-cosmetic composition, all as defined herein, may be combined/mixed with mesenchymal stem cells and/or follicle progenitor cells prior to be administered to, contacted with, or implanted into a mammal (preferably a human) to promote hair growth and/or prevent and/or decrease or suppress hair-loss.

[0974] In one example, the administration comprises the oral administration of a tablet, capsule, pill, powder, sustained release formulations, solution or suspension containing said (modified) cyclic GFR-binding compound, functionalised bioactive carrier, or hair-cosmetic composition, all as defined herein.

[0975] Suitable as forms of hair cosmetic compositions for implementing embodiments of the invention include hair rinse, hair mask, shampoo, conditioner, hair spray, hair foam, hair mousse, hair gel, hair tonic, hair setting composition, end fluid, neutralizer for permanent waves, hair colorant and bleach or hot-oil treatment.

[0976] Suitable formulations for use in hair treatment include, for instance, the ones described in US patent application No. 2011/0312884 A1, which is hereby incorporated by reference.

[0977] In one example, said hair cosmetic use of the invention is a non-therapeutic hair cosmetic use.

[0978] Hair cosmetic compositions of the invention may comprise at least one other active agent of hair cosmetic interest especially the conventional agents for hair treatment compositions especially at least one of the following agents:
[0979] anionic surfactants such as soaps, alkylsulfonates, alkylbenzenesulfonates, olefinsulfonates, alkyl ether sulfonates, glycerol ether sulfonates, methyl ester sulfonates, sulfo fatty acids, alkyl sulfates, fatty alcohol ether sulfates, glycerol ether sulfates, fatty acid ether sulfates, hydroxyl mixed ether sulfates, monoglyceride (ether) sulfates, fatty acid amide (ether) sulfates, mono- and dialkyl sulfosuccinates, mono- and dialkyl sulfosuccinamates, sulfotriglycerides, amide soaps, ethercarboxylic acids and salts thereof, fatty acid isethionates, fatty acid sarcosinates, fatty acid taurides, N-acylaminoacids, such as, for example, acyl lactylates, acyl tartrates, acyl glutamates and acyl aspartates, alkyl oligoglucosidesulfat. Suitable soaps are e.g. alkali metal, alkaline earth metal and ammonium salts of fatty acids, such as potassium stearate. Suitable olefinsulfonates may be present as alkali metal, alkaline earth metal, ammonium, alkylammonium, alkanolammonium or glucammonium salts. Preferably, the olefinsulfonates are present as sodium salts. The hydrolyzed alpha-olefinsulfonation product, i.e. the alpha-olefinsulfonates, are composed of ca. 60% by weight of alkanesulfonates and ca. 40% by weight of hydroxyalkanesulfonat.es; of these, about 80 to 85% by weight are monosulfonates and 15 to 20% by weight are disulfonates. Preferred methyl ester sulfonates (MES) are obtained by sulfonation of the fatty acid methyl esters of plant or animal fats or oils. Preference is given to methyl ester sulfonates from plant fats and oils, e.g. from rapeseed oil, sunflower oil, soya oil, palm oil, coconut fat, etc. Preferred sarcosinates are sodium lauroyl sarcosinate or sodium stearoyl sarcosinate. Preferred protein fatty acid condensates are plant products based on wheat. Preferred alkyl phosphates are mono- and diphosphoric acid alkyl esters.
[0980] Fatty alcohols having preferably 8 to 30 carbon atoms, particularly preferably 10 to 22 carbon atoms, in particular 12 to 20 carbon atoms. The hydrocarbon radical of the fatty alcohols can in principle be linear or branched, saturated or unsaturated. Typical examples of fatty alcohols are caproic alcohol, caprylic alcohol, 2-ethylhexyl alcohol, capric alcohol, lauryl alcohol, isotridecyl alcohol, myristyl alcohol, cetyl alcohol, palmoleyl alcohol, stearyl alcohol, isostearyl alcohol, oleyl alcohol, elaidyl alcohol, petroselinyl alcohol, linolyl alcohol, linolenyl alcohol, elaeostearyl alcohol and mixtures thereof. Preferred mixtures of the fatty alcohols are based on technical-grade alcohol mixtures which are produced e.g. during the high-pressure hydrogenation of technical-grade methyl esters based on fats and oils or during the hydrogenation of aldehydes from the oxo synthesis or during the dimerization of unsaturated fatty alcohols.
[0981] phospholipids, nonionic surfactants, amphoteric surfactants, cationic surfactants and mixtures thereof. Phospholipids are phosphorus-containing amphiphilic lipids such as phosphatidylserines, sphingomyelins and plasmalogens. Also suitable are the so-called lysophospholipids in which a fatty acid radical has been separated off from the phospholipid molecule to give an OH group, e.g. with the help of a phospholipase. The nonionic surfactants include, for example: fatty alcohol polyoxyalkylene esters, for example lauryl alcohol polyoxyethylene acetate, alkyl polyoxyalkylene ethers which are derived from low molecular weight C1-C6-alkohols or from C7-C30-fatty alcohols. Here, the ether component can be derived from ethylene oxide units, propylene oxide units, 1,2-butylene oxide units, 1,4-butylene oxide units and random copolymers and block copolymers thereof. These include specifically fatty alcohol alkoxylates and oxo alcohol alkoxylates such as isotridecyl alcohol and oleyl alcohol polyoxyethylene ethers, alkylaryl alcohol polyoxyethylene ethers, e.g. octylphenol polyoxyethylene ethers, alkoxylated animal and/or plant fats and/or oils, for example corn oil ethoxylates, castor oil ethoxylates, tallow fat ethoxylates, glycerol esters, such as, for example, glycerol monostearate, alkylphenol alkoxylates, such as, for example, ethoxylated isooctyl-, octyl- or nonylphenol, tributylphenol polyoxyethylene ether, fatty amine alkoxylates, fatty acid amide and fatty acid diethanolamide alkoxylates, in particular ethoxylates thereof, sugar surfactants, sorbitol esters, such as, for example, sorbitan fatty acid esters (sorbitan monooleate, sorbitan tristearate), polyoxyethylene sorbitan fatty acid esters, alkyl polyglycosides, N-alkylgluconamides, alkyl methyl sulfoxides, alkyl dimethyl phosphine oxides, such as, for example, tetradecyl dimethyl phosphine oxide. Suitable amphoteric surfactants are e.g. alkylbetaines, alkylamidopropylbetaines, alkylsulfobetaines, alkyl glycinates, alkyl carboxyglycinates, alkyl amphoacetates or propionates, alkyl amphodiacetates or dipropionates. For example, it is possible to use cocodimethylsulfopropylbetaine, laurylbetaine, cocamidopropylbetaine, sodium cocamphopropionate or tetradecyldimethylamine oxide. The cationic surfactants include, for example, quaternized ammonium compounds, in particular alkyltrimethylammonium and dialkyldimethylammonium halides and alkyl sulfates, and pyridine and imidazoline derivatives, in particular alkylpyridinium halides. For example, behenyl or cetyltrimethylammonium chloride may suitably be used.
[0982] an antidandruff active ingredient. Suitable antidandruff active ingredients are piroctone olamine (1-hydroxy-4-methyl-6-(2,4,4-trimethylpentyl)-2-(1H)-pyridinonemonoethanolamine salt), crinipan AD (climbazole), ketoconazole, elubiol, selenium disulfide, sulfur colloidal, sulfur polyethylene glycol sorbitan monooleate, sulfur ricinol polyethoxylate, sulfur tar distillates, salicylic acid (or in combination with hexachlorophene), undecylenic acid monoethanolamide sulfosuccinate Na salt, lamepon UD (protein-undecylenic acid condensate), zinc pyrithione, aluminum pyrithione and magnesium pyrithione/dipyrithione magnesium sulfate.
[0983] proteins and protein derivatives, cosmetically active polymers, hair pigmentation agents, bleaches, keratin-hardening substances, antimicrobial active ingredients, light filter active ingredients, repellent active ingredients, hyperemic substances, antiphlogistics, keratinizing substances, antioxidative active ingredient and/or free radical active ingredients, sebostatic active ingredients, plant extracts, antierythematous or antiallergic active ingredients and mixtures thereof.
[0984] a cosmetically acceptable auxiliary such as oil bodies, fats, waxes, pearlescent waxes, propellants, consistency regulators, thickeners, superfatting agents, stabilizers, polymers, silicone compounds, UV stabilizers, antioxidants, film formers, swelling agents, hydrotropes, solubilizers, preservatives, perfume oils, dyes, etc. and mixtures thereof.

[0985] In one aspect, the invention discloses a hair cosmetic care or treatment method, for a subject having need thereof, said method comprising the application, preferably topical or scalp injection applications, or administration of a hair cosmetic composition according to the present invention.

[0986] In one aspect, the present invention discloses a hair cosmetic care or treatment method in which the (modified) cyclic GFR-binding compound, functionalised bioactive carrier, or hair cosmetic composition, all as defined herein, is used to stimulate/activate hair follicle stem cells.

[0987] In one example, the subject who has need of the hair cosmetic care of the invention is a subject chosen from a population having an average age of more than 30 years old, preferably of more than 40 years old, more preferably of more than 50 years old.

### XX. Diagnostic Methods

[0988] In one aspect, the present disclosure provides a (modified) cyclic GFR-binding compound, a functionalised bioactive carrier or a medical or cosmetic composition as defined herein for use in a diagnostic method of a disease or condition which may require mesenchymal stem cells or progenitor cells (at any stage of differentiation thereof) to be differentiated.

[0989] In one aspect, the present disclosure provides a diagnostic method for diagnosing of a disease or condition which may require mesenchymal stem cells or progenitor cells (at any stage of differentiation thereof) to be differentiated comprising the provision of a (modified) cyclic GFR-binding compound or a pharmaceutical association, combination or composition as defined herein, and the contacting or administration of said cyclic GFR-binding compound or pharmaceutical association, combination or composition with a body part of a subject to be diagnosed.

[0990] A method for the diagnosis of a disease or condition which may require mesenchymal stem cells or progenitor cells (at any stage of differentiation thereof) to be differentiated in a patient, comprising obtaining a biological sample from a patient and apply fluorescent and/or radiolabeled (modified) GFR binding compounds, wherein high localisation of these compounds indicates a disease or condition which may require mesenchymal stem cells or progenitor cells (at any stage of differentiation thereof) to be differentiated in the patient.

### XXI. Kits

[0991] The present disclosure provides a variety of kits for conveniently and/or effectively carrying out methods and uses of the present invention. Typically, kits will comprise sufficient amounts and/or numbers of components to allow a user to perform multiple treatments of a subject(s) and/or to perform multiple experiments.

[0992] In one aspect, the present disclosure provides kits for pharmaceutical, dermatological, prophylactic, diagnostic, imaging or cosmetic functional association, combination or composition production, comprising at least one (modified) cyclic GFR-binding compound as defined herein, at least one bioactive carrier (such as a biomaterial or medical device) as defined herein, optionally a pharmaceutically, dermatologically, prophylactically, diagnostically, imaging or cosmetically acceptable excipient, carrier, vehicle or solvent, each and every one of them provided in an amount effective to produce a pharmaceutical, dermatological, prophylactic, diagnostic, imaging or cosmetic association to induce cell differentiation, promote tissue regeneration or protect a subject from a disease, disorder or condition as defined herein, when administered in-vitro, ex-vivo or in-vivo to a mesenchymal stem cell, progenitor cell (at any stage of differentiation thereof) or to a subject carrying such a cell, and packaging and instructions.

[0993] Suitable as solvents for use in kits of the invention include physiologically acceptable solvents, PBS, filtered and deionised water such as Milli-Q® water, alpha-MEM, DMEM and/or IMDM. All physiologically acceptable solvents suitable for implementing embodiments of the present invention are preferably deoxygenated before use.

[0994] In one example, said kit further comprises an administration device. In one example, said administration device is a dispensing device such as a syringe.

[0995] In one example, said kit comprises a first container containing a (modified) cyclic GFR-binding compound as defined herein and a second container containing a bioactive carrier such as a biomaterial or a medical device and a third container containing stem cells, preferably MSCs.

[0996] In one preferred example, a kit of the invention comprises (i) a first, preferably suitable, sterile, individual, container containing a (modified) cyclic GFR-binding compound as defined herein preferably in lyophilised form, (ii) a second, preferably suitable, sterile, individual, container containing a physiologically acceptable, sterile liquid (e.g. a solvent), (iii) a third, preferably suitable, sterile, individual, container containing a conventional biomaterial/medical device such as an orthopaedic or dental implant and, (iv) optionally, a fourth, preferably suitable, sterile, individual, container containing suitable stem cells, in particular adult stem cells or mesenchymal stem cells. In practice, said kit may be provided to an end-user (e.g. a surgeon). Said end-user may firstly pour the content of the second container into the first container, optionally provide a form of agitation to solubilise or suspend the (modified) cyclic GFR-binding compound of the invention in the physiologically acceptable, sterile liquid, then pour (or immerse) the resulting solution or suspension in the third container containing the conventional biomaterial/medical device (optionally with prior activation of said biomaterial/medical device if required), optionally followed by the contacting of the resulting functionalised biomaterial/medical device with the content of the fourth container containing the stem cells prior to placement onto or into a patient's body, preferably at a defect site.

[0997] Alternatively, a kit of the invention may comprise a first, preferably suitable, sterile, individual, container containing an already functionalised biomaterial/medical device e.g. a biomaterial/medical device functioanlised with a (modified) cyclic GFR-binding compound as defined herein, optionally in a physiologically acceptable liquid, and a second, preferably suitable, sterile, individual, container containing suitable stem cells, in particular adult stem cells or mesenchymal stem cells. In practice, an end-user such as a surgeon may apply the stem cells onto the coated biomaterial by pouring the content of the second container into the first containing (and optionally apply a form of agitation) prior to placement onto or into a patient's body, preferably at a defect site.

[0998] In one particular example, said kits of the invention may suitably be provided in the form of a sterile packaging.

[0999] For example, in certain embodiments, said kits of the invention comprises more than 2, between 2 and 25, between 2 and 15, or between 2 and 10 of (modified) cyclic GFR-binding compound as defined herein, and more than 2, between 2 and 25, between 2 and 15, or between 2 and 10 (modified) cyclic GFR-binding compound as defined herein.

[1000] In one example, each (modified) cyclic GFR-binding compound and each conventional or functionalised bioactive carrier is conditioned in distinct and separated compartments, in lyophilised form, in solution or in suspension in a pharmaceutically dermatologically, prophylactically, diagnostically, imaging or cosmetically acceptable excipient, carrier or vehicle.

[1001] In one aspect, the invention discloses kit-of-parts comprising a bioactive carrier and a (modified) cyclic GFR-binding compound both as defined herein for uses and methods as defined herein.

### XXII. Sequence Listing

[1002] Examples of (modified) cyclic GFR-binding compounds as defined herein are listed in the appended sequence listing which forms an integral part of the present application. (Modified) cyclic GFR-binding compounds of the present disclosure may be represented in non-cyclic, linear, form solely for the purpose of ease of representation but nevertheless remains cyclic compounds wherein the first and the last functional group (e.g. an amino acid) of the linearly represented compound are covalently connected to each other thereby forming a cyclic structure.

[1003] (Modified) cyclic GFR-binding compounds, functionalised bioactive carriers and compositions, all as defined in the present disclosure, has been found to lead to multiple and distinct advantages in terms of cell differentiation induction and tissue regeneration.

[1004] As supported by the examples of the present application, (modified) cyclic GFR-binding compounds, functionalised bioactive carriers or compositions thereof, all as defined herein, display advantages over (modified) cyclic GFR-binding compounds, functionalised bioactive carrier or compositions that do not contain it, such as:
[1005] Enhanced and/or more practical and/or more efficient and/or more cost-effective and/or more adapted to the end-user needs and/or tissue regeneration in mammals, preferably humans;
[1006] Modifying and/or enhancing and/or modulating and/or promoting and/or activating bone and/or cartilage and/or vascular and/or muscle and/or neuronal and/or blood and/or retinal and/or organs such as kidneys and lung and/or ligament/tendon and/or hair follicle and/or skin and/or adipose, tissue regeneration;
[1007] Modifying and/or enhancing and/or modulating and/or promoting and/or activating embryonic patterning;
[1008] Modifying and/or enhancing and/or modulating and/or promoting and/or activating cellular migration and wound healing;
[1009] Modifying and/or enhancing and/or modulating and/or promoting and/or activating the closure of any type of living tissue;
[1010] Modifying and/or enhancing and/or modulating and/or promoting and/or activating female fertility;
[1011] Preventing and/or suppressing or avoiding or reducing tissue degeneration in mammals, preferably humans;
[1012] Preventing and/or suppressing or avoiding or reducing bone and/or cartilage and/or vascular and/or muscle and/or neuronal and/or blood and/or retinal and/or organs such as kidneys or lungs and/or ligament/tendon and/or hair follicle and/or skin and/or adipose, tissue degeneration;
[1013] Preventing and/or suppressing or avoiding or reducing embryonic mispatterning;
[1014] Preventing and/or suppressing or avoiding or reducing cellular immobilisation and wound formation and/or progression;
[1015] Preventing and/or suppressing or avoiding or reducing the misclosure of any type of living tissue;
[1016] Preventing and/or suppressing or avoiding or reducing female infertility;
[1017] Preventing and/or suppressing or avoiding or reducing hair-loss;
[1018] Preventing/treating alopecia areata, alopecia totalis, alopecia universalis, androgenic alopecia (male pattern baldness), telogen effluvium, anagen effluvium or chemotherapy-induced alopecia;
[1019] Modifying and/or enhancing and/or modulating and/or promoting and/or activating the osteogenicity, and/or the chondrogenecity, and/or the myogenecity, and/or the endothelization and vascularization ability, and/or hair growth ability, and/or the wound healing ability, and/or the skin repair ability, and/or the tissue defect closure ability, and/or lung tissue regeneration ability, and/or renal tissue regeneration ability, and/or the neuroregeneration ability, and/or the ligament/tendon regeneration ability, and/or the female fertility ability, of a biomaterial which may be useful in the manufacturing of medical devices;
[1020] Modifying and/or enhancing and/or activating anti-ageing/anti-wrinkle effects/properties in cosmetic products;
[1021] Modifying and/or enhancing and/or activating hair growth effects/properties in pharmaceutical or cosmetic products;
[1022] Modifying and/or enhancing and/or modulating and/or promoting and/or inducing and/or activating stem cells, preferably adult stem cells, more preferably mesenchymal stem cells, commitment and/or differentiation in a specific lineage of cells;
[1023] Modifying and/or enhancing and/or modulating and/or promoting and/or inducing and/or activating progenitor cells differentiation and/or maturation.
[1024] Obtaining/producing functional differentiated cells;
[1025] Obtaining/producing differentiated cells with modified and/or improved functionality and/or physiological activity.

[1026] For example, in certain embodiments, (modified) cyclic GFR-binding compounds, functionalised bioactive carriers, or compositions according to the present disclosure in which PEP1 is a peptide selected from the group consisting of SAIS, NAIS, SATS and SPIS, have been found to lead to unexpectedly fast and qualitatively and quantitatively important osteoinduction, producing highly functional differentiated cells.

[1027] For example, in certain embodiments, (modified) cyclic GFR-binding compounds, functionalised bioactive carriers, or compositions according to the present disclosure in which PEP1 is a peptide selected from the group consisting of SAIS, NAIS, SPIS, EPLP, and EPLT, have been found to lead to unexpectedly fast and qualitatively and quantitatively important chondroinduction, producing highly functional differentiated cells.

[1028] For example, in certain embodiments, (modified) cyclic GFR-binding compounds, functionalised bioactive carriers, or compositions according to the present disclosure in which PEP1 is a peptide selected from the group consisting of SNIT, RPVQ and RSVK, have been found to lead to unexpectedly fast and qualitatively and quantitatively important vascular tissue induction, producing highly functional differentiated cells.

[1029] For example, in certain embodiments, (modified) cyclic GFR-binding compounds, functionalised bioactive carriers, or compositions according to the present disclosure in which PEP1 is selected from the group consisting of NAIS, SPIS and EPIS, have been found to lead to unexpectedly fast and qualitatively and quantitatively important neuronal induction, producing highly functional differentiated cells.

[1030] For example, in certain embodiments, (modified) cyclic GFR-binding compounds, functionalised bioactive carriers, or compositions according to the present disclosure in which PEP1 is SPIN, have been found to lead to unexpectedly fast and qualitatively and quantitatively important eye-retina cells induction, producing highly functional differentiated cells.

[1031] For example, in certain embodiments, (modified) cyclic GFR-binding compounds, functionalised bioactive carriers, or compositions according to the present disclosure in which PEP1 is SPIN, have been found to lead to unexpectedly fast and qualitatively and quantitatively important renal cells induction, producing highly functional differentiated cells.

[1032] For example, in certain embodiments, (modified) cyclic GFR-binding compounds, functionalised bioactive carriers, or compositions according to the present disclosure in which PEP1 is a peptide selected from the group consisting of NAIS, SPIS, EPLP and EPLT, have been found to lead to unexpectedly fast and qualitatively and quantitatively important tenocytes and/or fibrous cells induction, producing highly functional differentiated cells.

[1033] For example, in certain embodiments, (modified) cyclic GFR-binding compounds, functionalised bioactive carriers, or compositions according to the present disclosure in which PEP1 is selected from the group consisting of SNIT, RPVQ and RSVK, have been found to lead to unexpectedly fast and qualitatively and quantitatively important wound healing induction, producing highly functional differentiated cells.

[1034] For example, in certain embodiments, (modified) cyclic GFR-binding compounds, functionalised bioactive carriers, or compositions according to the present disclosure in which PEP1 is a peptide selected from the group consisting of EPLP, EPLT, RSVK and RPVQ, have been found to lead to unexpectedly fast and qualitatively and quantitatively important skin cells induction, producing highly functional differentiated cells.

[1035] For example, in certain embodiments, (modified) cyclic GFR-binding compounds, functionalised bioactive carriers, or compositions according to the present disclosure in which PEP1 is SSLS, have been found to lead to unexpectedly fast and qualitatively and quantitatively important hair follicle cells induction, producing highly functional differentiated cells.

[1036] For example, in certain embodiments, (modified) cyclic GFR-binding compounds, functionalised bioactive carriers, or compositions according to the present disclosure in which PEP1 is NAIS, have been found to lead to unexpectedly fast and qualitatively and quantitatively important ovarian cells induction, producing highly functional differentiated cells.

[1037] For example, in certain embodiments, (modified) cyclic GFR-binding compounds, functionalised bioactive carriers, or compositions according to the present disclosure in which PEP1 is selected from the group consisting of NAIS, SATS, SPIS, EPIS and SPIN, have been found to lead to unexpectedly fast and qualitatively and quantitatively important lung cells induction, producing highly functional differentiated cells.

[1038] For example, in certain embodiments, (modified) cyclic GFR-binding compounds, functionalised bioactive carriers, or compositions according to the present disclosure in which PEP1 is RSVK or RPVQ, have been found to lead to unexpectedly fast and qualitatively and quantitatively important muscle cells induction, producing highly functional differentiated cells.

[1039] For example, in certain embodiments, (modified) cyclic GFR-binding compounds, functionalised bioactive carriers, or compositions according to the present disclosure in which PEP1 is SNIT, have been found to lead to unexpectedly fast and qualitatively and quantitatively important blood cells induction, producing highly functional differentiated cells.

[1040] For example, in certain embodiments, (modified) cyclic GFR-binding compounds, functionalised bioactive carriers, or compositions according to the present disclosure in which PEP1 is SAIS or NAIS, have been found to lead to unexpectedly fast and qualitatively and quantitatively important adipocytes induction, producing highly functional differentiated cells.

[1041] For example, in certain embodiments, microenvironments comprising a plurality of structurally distinct/different (modified) cyclic GFR-binding compounds, functionalised bioactive carriers, or compositions according to the present disclosure in which each PEP1 is a peptide which may be selected from the group consisting of SAIS, SSLS, NAIS, SATS, SPIS, EPIS, SPIN, KPLS, EPLP, EPLT, SNIT, RSVK and RPVQ, have been found to lead to unexpectedly fast and qualitatively and quantitatively important tissue closure induction, producing highly functional differentiated cells.

[1042] Accordingly, it is possible to achieve tissue (bone, cartilage, vascular, endothelial, blood, neuronal, eye-retina, kidneys, lung, adipose, ligament, tendon, hair follicle, skin, ovary, etc.) regeneration using e.g. orthopedic, dental implants, matrix injections or administrable compositions, efficiently and rapidly thus reducing the costs associated with such treatments, improving and accelerating tissue healing and patient recovery.

[1043] In addition, it has been found that using the compounds, bioactive carrier and compositions of the present disclosure also permits a quasi-complete or complete control over the final chemical structure of the compounds, bioactive carrier and compositions of the present disclosure, thereby avoiding any unwanted (e.g. post-translational) modifications and unpredicted short half-life and quick metabolization.

[1044] Remarkably, it has also been found that using the compounds, bioactive carrier and compositions of the present disclosure allows for reduction (in most cases, important reduction) of the administered doses to provide a beneficial treatment to a patient in comparison with known technologies, thus decreasing or eliminating the risks of immune responses and reduce or eliminate drug/treatment toxicity.

[1045] It is another aspect of the present invention to solve the technical problem of providing a tissue regeneration environment/system being completely or at least partially devoid of one or more, preferably a plurality of the disadvantages of known treatments.

[1046] All combinations of any of the above-mentioned features described in all above part of the present description are specifically contemplated by the Applicant to be within the scope of the present invention unless contradictory in context. Examples of such combinations are detailed throughout the present description.

[1047] Further embodiments and advantages will become apparent to a skilled reader in light of the examples provided below.

### EXAMPLES

[1048] Disclosed and described, it is to be understood that this invention is not limited to the particular examples, process steps, and materials disclosed herein as such process steps and materials may vary somewhat. It is also to be understood that the terminology used herein is used for the purpose of describing particular embodiments only and not intended to be limiting since the scope of the present invention will be limited only by the appended claims and equivalents thereof.

[1049] The following Examples are representative of techniques employed by the inventor in carrying out aspects of the present invention. It should be appreciated that while these techniques are exemplary of preferred embodiments for the practice of the invention, those of skill in the art, in light of the present disclosure, will recognize that numerous modifications can be made without departing from the spirit and intended scope of the invention.

[1050] The following starting materials and reagents were used:
[1051] Apatite ceramics (also called apatite or ceramic in the present invention) were synthetized as described in Mater Res. 2004; 7(4): 625-630.
[1052] Titanium was obtained from Goodfellow®.
[1053] Hydrogel (poly(acrylamide-co-acrylic acid) gel) was synthetized as described in Langmuir 2011; 27(22):13635-42.
[1054] PEEK was obtained from Goodfellow®.
[1055] PET (Poly(ethylene terephthtalate) was obtained from Goodfellow®.
[1056] Type-I collagen sponge was obtained from Sigma®.
[1057] Hexane was obtained from Sigma®.
[1058] 3-succinimidyl-3-maleimidopropionate (SMP) was obtained from Sigma®.
[1059] DMF was obtained from Sigma®.
[1060] PBS 1× was obtained from Gibco®.
[1061] 3-(ethoxydimethylsilyl)propylamine was obtained from Sigma®.
[1062] Ammonium persulfate was obtained from Biorad®.
[1063] N,N,N′,N′-tetramethylethylenediamine was obtained from Aldrich®.
[1064] Acrylamid was obtained from Merck®.
[1065] Acrylic acid was obtained from Merck®.
[1066] N,N-methylene-bis-acrylamide was obtained from Merck®.
[1067] NaOH was obtained from Aldrich®.
[1068] N,N,N′,N′-tetramethylethylenediamine was obtained from Aldrich®.
[1069] Dimethylaminopropyl-3-ethylcarbodiimide hydrochloride was obtained from Aldrich®.
[1070] N-hydroxysuccinimide was obtained from Aldrich®.
[1071] 2-(N-morpholino)-ethane sulfonic acid was obtained from Aldrich®.
[1072] MilliQ water: is water characterised in terms of resistivity (typically 18.2 MΩ·cm at 25° C.).
[1073] Low glucose Dulbecco's Modified Eagle Medium (DMEM) was obtained from Invitrogen®
[1074] Minimum Essential Medium Eagle without ascorbic acid (αMEM) was obtained from Invitrogen®.
[1075] All of the cell culture experiments were carried out without any serum in the medium for the first 8 hours of culture.
[1076] Osteoblast progenitors or precursor osteoblasts: MC3T3-E1 cells were obtained from ATCC®. These cells were cultured in Alpha-MEM medium supplemented with 10% fetal calf serum (FCS) and 1% penicillin/streptomycin. All cells were used at a low passage number (passage 7), were subconfluently cultured and were seeded at 10⁴ cells/cm² for the purpose of the experiments.
[1077] Human bone marrow Mesenchymal Stem Cells (hMSCs) were obtained from Lonza®. These cells were cultured in Alpha-MEM supplemented with 10% (v/v) FBS and 1% penicillin/streptomycin and incubated in a humidified atmosphere containing 5% (v/v) CO₂ at 37° C. All cells were used at a low passage number (passage 2 to 4), were subconfluently cultured and were seeded at 10⁴ cells/cm² for the purpose of the experiments.
[1078] Human adipose Mesenchymal Stem Cells (haMSCs) were obtained from Lonza®. These cells were cultured in Alpha-MEM supplemented with 10% (v/v) FBS and 1% penicillin/streptomycin and incubated in a humidified atmosphere containing 5% (v/v) CO₂ at 37° C. All cells were used at a low passage number (passage 3 to 4), were subconfluently cultured and were seeded at 10⁴ cells/cm² for the purpose of the experiments.
[1079] Mouse Hair Follicle Stem Cells were isolated and cultured as described in Methods Mol Biol. 2010; 585:401-20.
[1080] Neuron cells are Neuronal Schwann Cells obtained from ATCC®. These cells were cultured in Dulbecco's Modified Eagle's Medium supplemented with 10% (v/v) FBS and 1% penicillin/streptomycin and incubated in a humidified atmosphere containing 5% (v/v) CO₂ at 37° C. All cells were used at a low passage number (passage 6-8), were subconfluently cultured and were seeded at 10⁴ cells/cm² for the purpose of the experiments.
[1081] Human umbilical-vein endothelial cells (HUVECs) were purchased from Promocell®. HUVECs were isolated and grown on gelatin coated culture flasks in a complete HUVEC culture medium (IMDM (Invitrogen, France) supplemented with 20% (v/v) fetal bovine serum (FBS) (PAA, France) and 0.4% (v/v) EC growth supplement/heparin kit (Promocell, France)). Cells were subcultured by using trypsin/EDTA (Invitrogen, France) and maintained in a humidified atmosphere containing 5% CO₂ at 37° C. These cells were used at a passage number 3 to 5 for the purpose of the experiments. HUVECs were seeded on each surface at a density of 50 000 cells/cm².
[1082] Human Mammary Epithelial Cells (HMEC) were obtained from Lonza®. These cells were cultured in Clonetics™ MEGM™ Mammary Epithelial Cell Growth Medium.
[1083] CMFDA is a Cell Tracker Green obtained from Invitrogen®.
[1084] DAPI was obtained from Sigma®.
[1085] Fetal bovine serum (FBS) was obtained from Gibco®.
[1086] Penicillin/streptomycin was obtained from Invitrogen®.
[1087] The AlamarBlue® assay was obtained from Molecular Probes®.
[1088] Runx2 antibody was obtained from Abcam®.
[1089] Osterix antibody was obtained from Santa Cruz Biotechnology®.
[1090] Osteopontin antibody was obtained from Abcam®,
[1091] Stro-1 antibody was obtained from Abcam®,
[1092] Sox2 antibody was obtained from Santa Cruz Biotechnology®.
[1093] Sox9 antibody was obtained from Santa Cruz Biotechnology®.
[1094] BMP-6 antibody was obtained from Abcam®,
[1095] CD31 (PECAM-1) antibody was obtained from Invitrogen®,
[1096] Primers for GAP 43: 5′-AAGCTACCACTGATAACTCGCC-3′ (Forward) and 5′-CTTCTTTACCCTCATCCTGTCG-3′ (Reverse) were obtained from Invitrogen®.
[1097] Primers for Aggrecan: 5′-CACTGTTACCGCCACTTCCC-3′ (Forward) and 5′-ACCAGCGGAAGTCCCCTTCG-3′ (Reverse) were obtained from Invitrogen®.
[1098] Primers for COMP: 5′-GCTCTGTGGCATACAGGAGA-3′ (Forward) and 5′-CATAGAATCGCACCCTGATG-3′ were obtained from Invitrogen®.
[1099] Primers for Runx2: 5′-GACGTGCCCAGGCGTATTTC-3′ (Forward) and 5′-AAGTCTGGGGTCCGTCAAGG-3′ (Reverse) were obtained from Invitrogen®.
[1100] Primers for HPRT: 5′-GCAGTACAGCCCCAAAATGG-3′ (Forward) and 5′-ACAAAGTCCGGCCTGTATCCAA-3′ (Reverse) were obtained from Invitrogen®.
[1101] All peptides were synthetized using conventional solution and/or solid phase peptide synthesis methods.
[1102] All experiments were carried out with a concentration of GFR-binding compounds as defined herein of 400 ng/mL. When cell culture duration extended beyond 24 h, a further 400 ng/mL solution of GFR-binding compounds as defined herein was added every 24 h.

[1103] The following general methods were used:

[1104] X-Ray Photoelectron Spectroscopy:

[1105] For X-ray photoelectron spectroscopy, AVG Scientific ESCALAB photoelectron spectrometer was used for the surface analysis with a non-monochromatized MgK 1253.6 eV source of 100 W. The area of the analytical X-ray spot on the sample surface was about 200 μm². A 45° insert angle that corresponds to about 5 nm of analyzed depth was used. A flood gun was used for charge compensation. Acquisition of high resolution spectra was performed at constant pass energy of 20 eV.

[1106] Optical Profilometry Probing:

[1107] The surface profiler system is a non-contact optical profiler that measures a wide range of surface heights. The vertical scanning interferometry mode allows for the measurement of rough surfaces and steps of up to several micrometers. This mode was used in order to measure the thickness of the extracellular matrix produced by the cells. First, after 24 h of culture, the cells were fixed with paraformaldehyde in PBS (4%) for 30 minutes at 4° C. and the samples were dehydrated in increasing concentrations of ethanol (30, 70, 80, 90, 95 and 100%) and critical-point dried. To evaluate the extent of the newly synthesized extracellular matrix, a spatula was used to scratch the surface of the materials. The samples were then metallized for 10 sec with gold or titanium before being analyzed. This procedure did not affect the cell shape and dimensions.

[1108] Immunostaining:

[1109] The cells were first fixed for 20 min with 4% paraformaldehyde/PBS at 4° C. After fixation, the cells were permeabilized in PBS containing 1% Triton X-100 for 15 min. Runx2, Osterix, Stro-1, Vinculin, Phalloidin, Osteopontin, Sox2, Sox9 antibodies were visualized by treating the cells with 1% (v/v) specific monoclonal antibodies for 1 hour at 37° C. Then the samples were incubated with Alexa Fluor® 568 or 647 (F(ab′)2 fragment of IgG(H+L)) during 30 min at room temperature. The cell nuclei were counterstained in 20 ng/mL DAPI for 10 min at room temperature.

[1110] Quantification of Positive Contact Numbers and Areas:

[1111] For this type of quantification the freeware image analysis ImageJ® software was used. The raw image was first converted to an 8-bit file, and then the unsharp mask feature was used (settings 1:0.2) to remove the image background (rolling ball radius 10). After smoothing, the resulting image, which appears similar to the original photomicrograph but with minimal background, was then converted to a binary image by setting a threshold. Threshold values were determined empirically by selecting a setting, which gave the most accurate binary image for a subset of randomly selected photomicrographs. The cell area was determined by manual delineation on raw fluorescent images. Total contact area and mean contact area per cell were calculated by “analyse particules” in ImageJ®. A minimum of 50 cells per condition were analyzed. Stro-1 expression was determined using this procedure.

[1112] Quantitative Real Time Polymerase Chain Reaction (Q-PCR):

[1113] Total RNA was extracted by using the RNeasy total RNA kit (Qiagen®) according to the manufacturer's instructions. Purified total RNA was used as a template in order to make cDNA by a reverse transcription reaction (Gibco BrI®) with random primers (Invitrogen®). The cDNA was then used as a template for a real-time PCR amplification in the presence of SYBR green reagents (Bio-Rad®) by using a thermocycler (iCycler, Biorad®). Data were analyzed with the iCycler IQ™® software and compared by the ΔΔCt method. Briefly, the mean Ct value of the target gene was normalized to its averaged Ct values of the housekeeping gene (HPRT) to give a ΔCt value, which was then normalized to a control sample to obtain a ΔΔCt value. The results were obtained from two series of experiments performed in a triplicate.

[1114] Semi-Quantitative RT-PCR:

[1115] Total RNA was extracted by using the RNeasy Mini Kit (Qiagen) and 1 mg RNA was used for cDNA synthesis with AMV kit (Invitrogen®) according to the manufacturer' instructions. Semi-quantitative reverse transcriptase-polymerase chain reaction (RT-PCR) was performed with Taq DNA Polymerase (Invitrogen®) in a thermocycler (Bio-Rad®). The cDNA input was normalized to glyceraldehyde-3-phosphate dehydrogenase (HPRT). The PCR products were analyzed on 2% agarose gels. For the Aggrecan gene, the PCR bands were densitometrically quantified by using the BioCapt software (Vilber). Values were normalized to HPRT, and results were reported as relative gene expression.

### Example 1: Osteoinductive Activity of GFR-Binding Compounds as Defined Herein

[1116] On control condition, human bone marrow mesenchymal stem cells were observed to have few focal adhesions complexes (FIG. 1). In contrast, cells cultured in the presence of GFR-binding compounds as defined herein (concentration of 400 ng/mL) for 24 hours were well spread with prominent and large increasing focal adhesions complexes (FIG. 1).

### Example 2: Osteogenic Differentiation of Human Mesenchymal Stem Cells

[1117] Human Mesenchymal Stem Cells (hMSCs) were obtained from Lonza®, Inc. Cells were then cultured in low glucose Dulbecco's Modified Eagle Medium (DMEM, Invitrogen®) supplemented with 10% (v/v) fetal bovine serum (FBS), 1% penicillin/streptomycin and incubated in a humidified atmosphere containing 5% (v/v) CO₂ at 37° C. All of the cell culture experiments were carried out without any serum in the medium for the first 8 hours of culture. All the cells were used at a low passage number passage 3), were subconfluently cultured and were seeded at 10 000 cells/cm² for the purpose of the experiments. Stem cell phenotype was analyzed after 62 hours of cell culture with and without GFR-binding compounds as defined herein (SEQ: ID NO: 3 to 8).

[1118] To probe this lineage specification, immunostaining for Runx2 and Osterix was performed after cell fixation as described in the Methods section. The quantification of Runx2 and Osterix positive contact numbers and areas was performed as described in the Methods section.

[1119] As shown in FIG. 2, when cultured with and without GFR-binding compounds as defined herein, the vast majority of the human bone marrow mesenchymal stem cells adheres, spreads, and differentiates into osteoblast-like cells, which was confirmed by increase in the Runx2 and Osterix protein expression (FIG. 2).

### Example 3: Non-Covalent Depositing of GFR-Binding Compounds as Defined Herein

[1120] Non-covalent modifications of the materials were performed in Air Atmosphere at room temperature. The non-covalent coating strategy consisted in using a mixture of inducing peptide (SEQ ID NO: 9; concentration of 1×10⁻³M) with an apatite ceramics implant or a mixture of inducing peptide (SEQ ID NO: 10; concentration of 1×10⁻³M) with a type-I collagen sponge. The non-covalently coated conventional materials were characterized by using fluorescent peptides (Here SEQ ID NO: 9 and 10 covalently bound to fluorescein isothiocyanate (FITC), FIG. 3). The results shown here in FIG. 3 were obtained from experiments performed with apatite ceramics and a type-I collagen sponge. It can be seen that the interaction between these peptides and the apatite ceramics or the type-I collagen is stable as no significant release of peptides was observed over time. Indeed, after 3, 7 or 10 days, the osteogenic peptides were still coated to the ceramics or the type-I collagen (FIG. 4). The biomaterial surface was characterized by X-ray photoelectron spectroscopy (Table 1). The X-ray photoelectron spectroscopy was performed as described in the Methods section.

[1121] The results presented in Table 1 were obtained for a apatite ceramics non-covalently modified with SEQ ID NO: 2.

TABLE 1

| Name | At. % C1s | At. % N1s |
|---|---|---|
| Ceramics | 19.39 | no detection |
| Ceramics non-covalently | 23.06 | 5.02 |
| grafted with SEQ ID NO: 2 | | |

### Example 4: Proliferation of Progenitor Bone Cells

[1122] The effect of the GFR-binding compounds as defined herein (SEQ ID NO: 11 to 14) of the present invention on the proliferation of osteoblast progenitors was investigated. MC3T3-E1 cells were cultured in Alpha-MEM medium supplemented with 10% fetal calf serum (FCS) and 1% penicillin/streptomycin. All the cells were used at a low passage number (passage 4), were subconfluently cultured and were plated at 10 000 cells/cm² for the purpose of the experiments. The stimulatory effect of the osteogenic peptides, coated to apatite ceramics or to type-I collagen on osteoblast progenitor cells, was compared to the effect of native apatite ceramics or of native type-I collagen sponge, which are already being used as bone graft/LT-Cage® lumbar tapered fusion devices designed to aid in the treatment of the degenerative disc disease (DDD) in humans. The AlamarBlue® assay was used to compare cell proliferation on the different biomaterials based on detection of metabolic activity. Analysis of these data showed that the cell proliferation proceeded more significantly on apatite ceramics and type-I collagen sponge when coupled to osteogenic peptides as compared to native apatite ceramics and native type-I collagen sponge (FIG. 5).

### Example 5: Osteogenic Differentiation of Human Mesenchymal Stem Cells

[1123] GFR-binding compounds as defined herein were non-covalently deposited on apatite ceramics or type-I collagen onto apatite ceramics or onto type-I collagen sponge. Human Mesenchymal Stem Cells (hMSCs) were obtained from Lonza®, Inc. Cells were then cultured in low glucose Dulbecco's Modified Eagle Medium (DMEM, Invitrogen®) supplemented with 10% (v/v) fetal bovine serum (FBS), 1% penicillin/streptomycin and incubated in a humidified atmosphere containing 5% (v/v) CO₂ at 37° C. All cell culture experiments were carried out without any serum in the medium for the first 8 hours of culture. All cells were used at a low passage number passage 3), were subconfluently cultured and were seeded at 10 000 cells/cm² for the purpose of the experiments.

[1124] The cell phenotype was analyzed after 96 hours of cell culture on apatite ceramics coated with osteogenic peptides or on a type-I collagen sponge coated with osteogenic peptides (SEQ: ID NO: 15 to 18). On GFR-binding compounds as defined herein-coated apatite ceramics and type-I collagen sponge, the vast majority of the human bone marrow mesenchymal stem cells adhere, spread, and differentiate into osteoblast-like cells as confirmed by analysis of Runx2 and Osterix expression (FIG. 6). To probe this lineage specification, immunostaining for Runx2 and Osterix was performed after cell fixation as described in the Methods section. The quantification of Runx2 and Osterix positive contact numbers and areas was performed as described in the Methods section.

### Example 6: Osteogenic Differentiation of Osteoblast Progenitors

[1125] Mature osteoblasts are the cells responsible for bone formation and are derived from precursor osteoblasts. Mature osteoblasts were obtained and characterized by the expression of osteoblastic markers such as Runx2 and the synthesis of extracellular matrix proteins.

[1126] The effect of these GFR-binding compounds as defined herein (SEQ ID NO: 19 and 20) on the differentiation of osteoblast progenitors was evaluated. These osteoblast progenitors were seeded onto the apatite ceramics or on type-I collagen sponge that were both coated with osteogenic peptides. The cells were differentiated into mature osteoblasts after 48 hours of culture on these non-covalently coated materials. The differentiated osteoblast progenitors produced extensive amounts of extracellular matrix proteins such as Osteopontin (OPN) as compared to the osteoblast precursors cultured on a native type-I collagen sponge or on a native apatite ceramics. This was seen from Osteopentin immunofluorescence staining after cell fixation as described in the Methods section (FIG. 7).

[1127] Finally, it was verified that the osteoblast progenitors were differentiated into mature osteoblasts by analyzing the expression of the osteogenic biomarker Runx2. An increase in the Runx2 gene expression after 24 hours of culture (FIG. 8a) was observed by using Quantitative Real Time Polymerase Chain Reaction as described in the Methods section.

[1128] Finally, it was verified that the hMSCs were differentiated into mature osteoblasts by analyzing the activity of the osteogenic biomarker ALP (Alkaline Phosphatase Activity). We observed an increase in the ALP activity after 1 week of culture on type-I collagen sponge coupled with GFR-binding compounds as defined herein (SEQ ID NO: 19) (FIG. 8b).

### Example 7: GFR-Binding Compounds as Defined Herein Inducing Cartilage Regeneration

[1129] hMSCs were cultured on with and without GFR-binding compounds as defined herein (SEQ ID NO: 23 and 24). The expression of the Sox9 protein was observed after 96 hours of culture suggesting that hMSCs have committed towards chondrocyte like cell differentiation (FIG. 9a).

[1130] It was then verified that these hMSCs cultured with and without GFR-binding compounds as defined herein were differentiated into chondrocyte cells by analyzing the expression of the chondrocyte gene biomarker: Aggrecan. The increased expression of this gene was observed after 96 hours of culture (FIG. 9b). For that a semi-quantitative RT-PCR was performed as described in the Methods section for the Aggrecan gene and a Quantitative Real Time PCR for Sox9.

### Example 8: GFR-Binding Compounds as Defined Herein Inducing Endothelialization

[1131] Human umbilical-vein endothelial cells were cultured with and without GFR-binding compounds as defined herein (SEQ ID NO: 26). An increase in the area of the adherent junctions (CD31) was observed after 36 hours of culture with GFR-binding compounds as defined herein (FIG. 10). The results observed showed that the GFR-binding compounds as defined herein have the ability to rapidly induce stent endothelialization.

### Example 9: GFR-Binding Compounds as Defined Herein Inducing Angiogenesis

[1132] Human umbilical-vein endothelial cells were cultured with and without GFR-binding compounds as defined herein (SEQ ID NO: 27). The formation of tube-like structures was observed after 18 hours of culture with vascular peptide (FIG. 11). The results observed showed that the GFR-binding compounds as defined herein have the ability to rapidly induce angiogenesis.

### Example 10: Wound Healing/Increase of Collective Cell Migration

[1133] Human epithelial cells were cultured with or without GFR-binding compounds as defined herein (SEQ ID NO: 28). A usual scratch test was applied (Nat Protoc 2: 329-333) on a monolayer of these epithelial cells in culture (FIG. 12a). An increase in the cell migration velocity for cells cultured with peptides was observed after 18 hours of culture. The cells migrated collectively and the communication between cells was maintained (FIG. 12b). In fact, the injury has been closed rapidly for the cells cultured with GFR-binding compounds as defined herein. The results observed showed that the GFR-binding compounds as defined herein have the ability to rapidly induce tissue closure such as in wound healing.

### Example 11: Loss of Quiescence and Activation of Hair Follicle Stem Cells

[1134] Isolated Hair Follicle Stem Cells were cultured with and without GFR-binding compounds as defined herein (SEQ ID NO: 29 and 30). An increase in the Sox2 protein expression was observed illustrating the activation of these stem cells (FIG. 13a). In parallel, a decrease in the BMP-6 release in the cell culture medium was observed (FIG. 13b). In our conditions, the decrease in the BMP-6 release is indicating that the hair follicle stem cells were activated and that the hair growth process has been induced.

### Example 12: Muscle Differentiation of Human Mesenchymal Stem Cells

[1135] hMSCs were cultured with and without GFR-binding compounds as defined herein (SEQ ID NO: 31 to 36). We observed an increase in the cell area of the cells cultured with GFR-binding compounds as defined herein after 62 hours of culture suggesting that hMSCs have committed towards muscle differentiation (FIG. 14a).

[1136] It was then verified that these hMSCs cultured treated with GFR-binding compounds as defined herein were differentiated into muscle cells by analyzing the expression of the musculogenic biomarker COMP (Cartilage Oligomeric Matrix Protein). An increased expression of this gene was observed after 96 hours of culture (FIG. 14b). For that a Quantitative Real Time PCR was performed as described in the Methods section.

### Example 13: Neuron Growth

[1137] Neurons were cultured with and without GFR-binding compounds as defined herein (SEQ ID NO: 38). A rapid establishment of cell-cell contacts via dendrite growth was observed after 6 hours of culture with GFR-binding compounds as defined herein. To further confirm this, the expression of the Growth Associated Protein 43 (GAP43) gene was verified for neuron cells cultured with neurogenic peptides (SEQ ID NO: 38). A high level of expression of this gene was observed after 48 hours of culture with the GFR-binding compounds as defined herein by using Quantitative Real Time Polymerase Chain Reaction as described in the Methods section (FIG. 15).

### Example 14: Loss of Stemness

[1138] hMSCs were cultured on conventional cell culture plastic plates with and without the presence in the cell culture media of different GFR-binding compounds as defined hereins (SEQ ID NO: 39 to 45) in solution. A rapid (48 hours) loss of the stemness marker STRO-1 was observed for the cells cultured in the presence of GFR-binding compounds as defined herein in the cell media solution (FIG. 19). This was probed by Stro-1 immunostaining after cell fixation as described in the Methods section. The quantification of Stro-1 positive contact numbers and areas was performed as described in the Methods section. A minimum of 30 cells per condition were analyzed. One should note that it is commonly admitted that the expression of STRO-1 in a cell is indicative of a cell that is in a substantially non-differentiated state and the decrease of its expression of at least about 20% is indicative of a cell that has started a processus of differentiation but which may not result in the differentiation of the cell. A decrease of more than 50% would be indicative of the presence of a significant shift towards a differentiated state. A decrease of more than 70% would be indicative of the presence of a very important shift towards a differentiated state. A sustained decrease (e.g. for at least 96 h) of more than 50% or 70% would be indicative of the presence of an even more important shift towards a differentiated state.

[1139] Likewise, hMSCs were cultured on conventional cell culture plastic plates with and without the presence in the cell culture media of different GFR-binding compounds as defined herein (SEQ ID NO: 1581 to 1606) in solution. A rapid (48 hours) loss of the stemness marker STRO-1 was observed for the cells cultured in the presence of GFR-binding compounds as defined herein in the cell media solution. This strong decrease was also confirmed after 96 h.

TABLE 2

| | | STRO-1 |
|---|---|---|
| SEQ ID | | Expression |
| NO: | Sequences | (%) after 48 h |
| 1581 | GGGGGGGGGDENEKVVNDEGLESVPEDLSSLSVLFFDENEKVV | 33 |
| 1582 | GGGGGGGGGDDSSNVIRVPSTSSVPTGQSAISTLYLDDSSNVI | 29 |
| 1583 | GGGGGGGGGDDSSNVIRVPSTSSAPTKMNAISMLYFDENEKVV | 34 |
| 1584 | GGGGGGGGGDENEKVVGIPEPSSAPVDLKPLSTLYVDENEKVV | 31 |
| 1585 | AAAAAAAAADENEKVVAASKASSVPQEEEPLPMVYYDAANNVV | 27 |
| 1586 | GGGGGGGGGDDSSNVIKIPKASSVPTGGSNITVQIMDDSSNVI | 31 |
| 1587 | AAAAAAAAADENEKVVAASKASSSRVELRSVKIAKVDDSSNVI | 33 |
| 1588 | GGGGGGGGGDENEKVVKIPKASSTQVRLRPVQIRKIDAANNVV | 30 |
| 1589 | GGGGGGGGGDDSSNVISTPPTSSSRVQLSAISMLYLDDSSNVI | 22 |
| 1590 | GGGGGGGGGDENEKVVRVPSTSSTQVKMSAISMLYLDENEKVV | 23 |
| 1591 | AAAAAAAAADAANNVVKIPKASSSRVRLSSLSTLFFDAANNVV | 21 |
| 1592 | GGGGGGGGGDDSSNVIAASKASSTPTDLNAISTLYFDDSSNVI | 30 |
| 1593 | GGGGGGGGGDENEKVVRVPSTSSTQVDLNAISVLYFDENEKVV | 32 |
| 1594 | AAAAAAAAADAANNVVGIPEPSSVSQELSATSMLYYDAANNVV | 31 |
| 1595 | GGGGGGGGGDDSSNVIGIPEPSSAPTRLEPISMLYLDENEKVV | 27 |
| 1596 | GGGGGGGGGDENEKVVKIPKASSVSQQLEPISTLYLDENEKVV | 19 |
| 1597 | GGGGGGGGGDENEKVVSTPPTSSVPTEVSPINTLYFDENEKVV | 38 |
| 1598 | AAAAAAAAADENEKVVKIPKASSVPTKMKPLSVLYVDDSSNVI | 37 |
| 1599 | GGGGGGGGGDDSSNVISTPPTSSVSQKMKPLSILYVDDSSNVI | 35 |
| 1600 | GGGGGGGGGFDNDENVVRVPSTSSVPEKMEPLTMLYYFDNDENVV | 29 |
| 1601 | GGGGGGGGGFDNDENVVSTPPTSSTPTKMSNITTQIMFDNDENVV | 41 |
| 1602 | AAAAAAAAADENEKVVRVPSTSSVPAEESNITVQIMDDSSNVI | 42 |
| 1603 | GGGGGGGGGFDNDENVVAASKASSVPQRLRSVKVAKVFDNDENVV | 34 |
| 1604 | AAAAAAAAADAANNVVKIPKASSTQVRLRSVKTAKVDAANNVV | 35 |
| 1605 | AAAAAAAAADENEKVVAASKASSVPEKMRPVQTRKIDDSSNVI | 30 |
| 1606 | GGGGGGGGGFDNDENVVGIPEPSSAPVDMRPVQIRKIFDNDENVV | 43 |

1. A cyclic peptide or a cyclic peptidomimetic, with between 10 and 35 amino acids, having a growth factor receptor-binding capability and comprising a peptide with four amino acids PEP1 and a peptide with three amino acids PEP3;
wherein PEP1 is SAIS;
and wherein PEP3 is selected from the group consisting of VPT, VPE, APT, TPT, VPA, APV, VPQ, VSQ, SRV and TQV.

2.-9. (canceled)

10. A cyclic peptide or a cyclic peptidomimetic according to claim 1, wherein said growth factor receptor is selected from the group consisting of platelet-derived growth factor, platelet-derived angiogenesis factor, vascular endothelial growth factor, platelet-derived epidermal growth factor, transforming growth factor beta, transforming growth factor A, epidermal growth factor, fibroblast growth factor, acidic fibroblast growth factor, basic fibroblast growth factor, insulin-like growth factors 1 and 2, keratinocyte growth factor, tumor necrosis factor, fibroblast growth factor and interleukin-1, Keratinocyte Growth Factor-2, and combinations thereof.

11.-14. (canceled)

15. A cyclic peptide or a cyclic peptidomimetic according to claim 1, comprising a peptide with between six and twelve amino acids PEP9; wherein PEP9 is a peptide of general formula PEP7-PEP5; wherein PEP5 is a cyclic peptide of formula PEP3-AA¹⁷-AA¹²; wherein PEP3 is selected from the group consisting of VPT, VPE, APT, TPT, VPA, APV, VPQ, VSQ, SRV and TQV; wherein AA¹¹ is selected from the group consisting of E, K, Q, R, A, D, G and H; and wherein AA¹² is selected from the group consisting of L, M, T, E, Q and H; wherein PEP7 is an amino acid or a peptide with between two and seven amino acids of general formula AA¹-AA²-AA³-AA⁴-AA⁵-AA⁶-AA⁷; wherein AA¹, AA², AA³, AA⁴, and AA⁵ are independently absent or any amino acids; wherein AA⁶ is absent or selected from the group consisting of S, T, C, E, Q, P and R; wherein AA⁷ is absent or is selected from the group consisting of S, T, C, E, Q, P and R.

16. (canceled)

17. A cyclic peptide or a cyclic peptidomimetic according to claim 1, comprising a peptide with three amino acids PEP3 and an amino acid or a peptide with between two and seven amino acids PEP7; wherein PEP7 is an amino acid or a peptide with between two and seven amino acids of general formula AA¹-AA²-AA³-AA⁴-AA⁵-AA⁶-AA⁷; wherein AA¹, AA², AA³, AA⁴, and AA⁵ are independently absent or any amino acids; wherein AA⁶ is absent or selected from the group consisting of S, T, C, E, Q, P and R; wherein AA⁷ is absent or is selected from the group consisting of S, T, C, E, Q, P and R, and wherein at least one of AA¹, AA², AA³, AA⁴, AA⁵, AA⁶ or AA⁷ is not absent.

18.-33. (canceled)

34. A cyclic peptide or a cyclic peptidomimetic according to claim 15, wherein the pair PEP5:PEP1 is selected from the group consisting of VPTKM:SAIS, VPTKL:SAIS, VPTQL:SAIS, VPTRL:SAIS, VPTKT:SAIS, VPTAL:SAIS, VPTDL:SAIS, VPEKM:SAIS, APTKL:SAIS, APTQL:SAIS, TPTKM:SAIS, VPARL:SAIS, APVKT:SAIS, VPQAL:SAIS, VSQDL:SAIS, VPQDL:SAIS, SRVHH:SAIS, and TQVQL:SAIS.

35.-36. (canceled)

37. A cyclic peptide or a cyclic peptidomimetic according to claim 15, wherein the triplet PEP7:PEP3:PEP1 is selected from the group consisting of GIPEPXX:VPT:SAIS, HVTKPTX:VPT:SAIS, YVPKPXX:VPT:SAIS, TVPKPXX:VPT:SAIS, AVPKAXX:VPT:SAIS, KVGKAXX:VPT:SAIS, KASKAXX:VPT:SAIS, GSAGPXX:VPT:SAIS, AAPASXX:VPT:SAIS, STPPTXX:VPT:SAIS, HVPKPXX:VPT:SAIS, RVPSTXX:VPT:SAIS, ASAAPXX:VPT:SAIS, ASASPXX:VPT:SAIS, GIPEPXX:VPE:SAIS, HVTKPTX:APT:SAIS, YVPKPXX:APT:SAIS, TVPKPXX:APT:SAIS, AVPKAXX:APT:SAIS, GSAGPXX:TPT:SAIS, AAPASXX:VPA:SAIS, HVPKPXX:APT:SAIS, RVPSTXX:APV:SAIS, ASAAPXX:VPQ:SAIS, ASASPXX:VSQ:SAIS, ASASPXX:VPQ:SAIS, SSVKXQP:SRV:SAIS, and RNVQXRP:TQV:SAIS.

38. A cyclic peptide or a cyclic peptidomimetic according to claim 15, wherein the triplet PEP7:PEP5:PEP1 is selected from the group consisting of GIPEPXX:VPTKM:SAIS, HVTKPTX:VPTKL:SAIS, YVPKPXX:VPTKL:SAIS, TVPKPXX:VPTQL:SAIS, AVPKAXX:VPTKL:SAIS, KVGKAXX:VPTKL:SAIS, KASKAXX:VPTKL:SAIS, GSAGPXX:VPTKM:SAIS, AAPASXX:VPTRL:SAIS, STPPTXX:VPTRL:SAIS, HVPKPXX:VPTKL:SAIS, RVPSTXX:VPTKT:SAIS, ASAAPXX:VPTAL:SAIS, ASASPXX:VPTDL:SAIS, GIPEPXX:VPEKM:SAIS, HVTKPTX:APTKL:SAIS, YVPKPXX:APTKL:SAIS, TVPKPXX:APTQL:SAIS, AVPKAXX:APTKL:SAIS, GSAGPXX:TPTKM:SAIS, AAPASXX:VPARL:SAIS, HVPKPXX:APTKL:SAIS, RVPSTXX:APVKT:SAIS, ASAAPXX:VPQAL:SAIS, ASASPXX:VSQDL:SAIS, ASASPXX:VPQDL:SAIS, SSVKXQP:SRVHH:SAIS, and RNVQXRP:TQVQL:SAIS.

39. A cyclic peptide or a cyclic peptidomimetic, according to claim 1, wherein said cyclic peptide or cyclic peptidomimetic may be any one of cyclic peptides of SEQ ID NO: 1 to 12519.

40.-53. (canceled)

54. A cyclic peptide or a cyclic peptidomimetic, having growth factor receptor-binding capability, according to claim 1, comprising at least one biomaterial-affinity-containing group, wherein said at least one biomaterial-affinity-containing group provides said cyclic peptide or cyclic peptidomimetic, with the ability to covalently or non-covalently interact with a biomaterial.

55.-60. (canceled)

61. A functionalized biomaterial comprising at least one cyclic peptide or a cyclic peptidomimetic according to claim 1, and a biomaterial.

62.-63. (canceled)

64. A medical device comprising at least one cyclic peptide or cyclic peptidomimetic according to claim 1.

65. A medical composition comprising at least one cyclic peptide or cyclic peptidomimetic according to claim 1, and a medically acceptable carrier.

66.-93. (canceled)

94. A method of inducing cell differentiation, tissue regeneration, or tissue formation comprising the in-vitro, ex-vivo or in-vivo administration of an effective amount of a peptide or peptidomimetic according to claim 1; wherein said method is selected from the group consisting of pharmaceutical, surgical, dermatological, prophylactic, diagnostic, imaging methods, and any combination thereof.

95. A method of inducing cell differentiation, tissue regeneration, or tissue formation comprising the in-vitro, ex-vivo or in-vivo administration of an effective amount of a functionalized biomaterial according to claim 61; wherein said method is selected from the group consisting of pharmaceutical, surgical, dermatological, prophylactic, diagnostic, imaging methods, and any combination thereof.

96. A method of inducing cell differentiation, tissue regeneration, or tissue formation comprising the in-vitro, ex-vivo or in-vivo administration of an effective amount of a medical composition according to claim 65; wherein said method is selected from the group consisting of pharmaceutical, surgical, dermatological, prophylactic, diagnostic, imaging methods, and any combination thereof.

97. The method according to claim 94, wherein said method may be used for protecting a patient from a disease, condition, disorder, or pathology selected from the group consisting of enhancing osteogenesis, inducing bone formation, inducing osteocyte maturation, treating, preventing or diagnosing osteoporosis, enhancing chondrogenesis, inducing cartilage formation, inducing chondrocyte maturation, treating or preventing osteoarthritis, treating or preventing costochondritis, treating or preventing herniation, treating or preventing achondroplasia, treating, preventing or diagnosing relapsing polychondritis; enhancing tissue closure; treating obesity, Dercum's disease, Multiple symmetric lipomatosis, Familial multiple lipomatosis, Lipodystrophy, Lipedema, Atherosclerosis, and any combination thereof.

98. The method according to claim 95, wherein said method may be used for protecting a patient from a disease, condition, disorder, or pathology selected from the group consisting of enhancing osteogenesis, inducing bone formation, inducing osteocyte maturation, treating, preventing or diagnosing osteoporosis, enhancing chondrogenesis, inducing cartilage formation, inducing chondrocyte maturation, treating or preventing osteoarthritis, treating or preventing costochondritis, treating or preventing herniation, treating or preventing achondroplasia, treating, preventing or diagnosing relapsing polychondritis; enhancing tissue closure; treating obesity, Dercum's disease, Multiple symmetric lipomatosis, Familial multiple lipomatosis, Lipodystrophy, Lipedema, Atherosclerosis, and any combination thereof.

99. The method according to claim 96, wherein said method may be used for protecting a patient from a disease, condition, disorder, or pathology selected from the group consisting of enhancing osteogenesis, inducing bone formation, inducing osteocyte maturation, treating, preventing or diagnosing osteoporosis, enhancing chondrogenesis, inducing cartilage formation, inducing chondrocyte maturation, treating or preventing osteoarthritis, treating or preventing costochondritis, treating or preventing herniation, treating or preventing achondroplasia, treating, preventing or diagnosing relapsing polychondritis; enhancing tissue closure; treating obesity, Dercum's disease, Multiple symmetric lipomatosis, Familial multiple lipomatosis, Lipodystrophy, Lipedema, Atherosclerosis, and any combination thereof.

100. A method of producing a physiologically functional and healthy cell, comprising the administration in-vitro, ex-vivo or in-vivo to a mesenchymal stem cell or progenitor cell, at any stage of differentiation thereof, of an effective amount of a peptide or a peptidomimetic according to claim 1, and wherein said physiologically functional and healthy cell is selected from the group consisting of an osteoblast, osteocyte, chondroblast, chondrocyte, neuroblast, neurocyte, Sertoli cells, Leydig cell, Germ cell, myoblast, myocyte, keratinocyte, endothelial cells, angioblast, fibroblast, fibrocyte, podocyte, areolar connective cells, adipocytes, pre-adipocytes/lipoblasts, epithelial cells, erythrocytes, alveolar cells, hematopoietic stem cells (HSC), myeloid progenitors, lymphoid progenitors, mast cells, myeloblasts, monocytes, macrophages, neutrophils, basophils, eosinophils, erythrocytes, megakaryocytes, thrombocytes, dendritic cells, small lymphocytes, T-lymphocytes (T-cells), B-lymphocytes (B-cells), and natural killer (NK)-cells.

101. A method of producing a physiologically functional and healthy cell, comprising the administration in-vitro, ex-vivo or in-vivo to a mesenchymal stem cell or progenitor cell, at any stage of differentiation thereof, of an effective amount of a functionalized biomaterial according to claim 61, and wherein said physiologically functional and healthy cell is selected from the group consisting of an osteoblast, osteocyte, chondroblast, chondrocyte, neuroblast, neurocyte, Sertoli cells, Leydig cell, Germ cell, myoblast, myocyte, keratinocyte, endothelial cells, angioblast, fibroblast, fibrocyte, podocyte, areolar connective cells, adipocytes, pre-adipocytes/lipoblasts, epithelial cells, erythrocytes, alveolar cells, hematopoietic stem cells (HSC), myeloid progenitors, lymphoid progenitors, mast cells, myeloblasts, monocytes, macrophages, neutrophils, basophils, eosinophils, erythrocytes, megakaryocytes, thrombocytes, dendritic cells, small lymphocytes, T-lymphocytes (T-cells), B-lymphocytes (B-cells), and natural killer (NK)-cells.

102. A method of producing a physiologically functional and healthy cell, comprising the administration in-vitro, ex-vivo or in-vivo to a mesenchymal stem cell or progenitor cell, at any stage of differentiation thereof, of an effective amount of a medical composition according to claim 65, and wherein said physiologically functional and healthy cell is selected from the group consisting of an osteoblast, osteocyte, chondroblast, chondrocyte, neuroblast, neurocyte, Sertoli cells, Leydig cell, Germ cell, myoblast, myocyte, keratinocyte, endothelial cells, angioblast, fibroblast, fibrocyte, podocyte, areolar connective cells, adipocytes, pre-adipocytes/lipoblasts, epithelial cells, erythrocytes, alveolar cells, hematopoietic stem cells (HSC), myeloid progenitors, lymphoid progenitors, mast cells, myeloblasts, monocytes, macrophages, neutrophils, basophils, eosinophils, erythrocytes, megakaryocytes, thrombocytes, dendritic cells, small lymphocytes, T-lymphocytes (T-cells), B-lymphocytes (B-cells), and natural killer (NK)-cells.

103. A surgical method for surgical treatment comprising the contacting of a peptide or a peptidomimetic according to claim 1 with a body part of a patient to be treated, wherein said contacting induces stem cell differentiation and tissue formation.

104. A surgical method for surgical treatment comprising the contacting of a functionalized biomaterial according to claim 61 with a body part of a patient to be treated, wherein said contacting induces stem cell differentiation and tissue formation.

105. A surgical method for surgical treatment comprising the contacting of a medical device according to claim 64 with a body part of a patient to be treated, wherein said contacting induces stem cell differentiation and tissue formation.

106. Kits for pharmaceutical, surgical, dermatological, prophylactic, diagnostic, or imaging functional association production, comprising at least one peptide or peptidomimetic according to claim 1, at least one bioactive carrier, each and every one of them provided in an amount effective to produce a pharmaceutical, surgical, dermatological, prophylactic, diagnostic, or imaging association to induce cell differentiation, promote tissue regeneration or protect a subject from a disease, disorder, pathology or condition selected from the group consisting of enhancing osteogenesis, inducing bone formation, inducing osteocyte maturation, treating, preventing or diagnosing osteoporosis, enhancing chondrogenesis, inducing cartilage formation, inducing chondrocyte maturation, treating or preventing osteoarthritis, treating or preventing costochondritis, treating or preventing herniation, treating or preventing achondroplasia, treating, preventing or diagnosing relapsing polychondritis; enhancing tissue closure; treating obesity, Dercum's disease, Multiple symmetric lipomatosis, Familial multiple lipomatosis, Lipodystrophy, Lipedema, Atherosclerosis, and any combination thereof, when administered in-vitro, ex-vivo or in-vivo to a mesenchymal stem cell, progenitor cell, at any stage of differentiation thereof, or to a subject carrying such a cell, and packaging and instructions.

107. Kits for pharmaceutical, surgical, dermatological, prophylactic, diagnostic, or imaging functional association production, comprising at least one functionalized biomaterial according to claim 61, at least one bioactive carrier, each and every one of them provided in an amount effective to produce a pharmaceutical, surgical, dermatological, prophylactic, diagnostic, or imaging association to induce cell differentiation, promote tissue regeneration or protect a subject from a disease, disorder, pathology or condition selected from the group consisting of enhancing osteogenesis, inducing bone formation, inducing osteocyte maturation, treating, preventing or diagnosing osteoporosis, enhancing chondrogenesis, inducing cartilage formation, inducing chondrocyte maturation, treating or preventing osteoarthritis, treating or preventing costochondritis, treating or preventing herniation, treating or preventing achondroplasia, treating, preventing or diagnosing relapsing polychondritis; enhancing tissue closure; treating obesity, Dercum's disease, Multiple symmetric lipomatosis, Familial multiple lipomatosis, Lipodystrophy, Lipedema, Atherosclerosis, and any combination thereof, when administered in-vitro, ex-vivo or in-vivo to a mesenchymal stem cell, progenitor cell, at any stage of differentiation thereof, or to a subject carrying such a cell, and packaging and instructions.

108. A cyclic peptide or a cyclic peptidomimetic, having growth factor receptor-binding capability, according to claim 15, comprising at least one biomaterial-affinity-containing group, wherein said at least one biomaterial-affinity-containing group provides said cyclic peptide or a cyclic peptidomimetic, with the ability to covalently or non-covalently interact with a biomaterial.

109. A cyclic peptide or a cyclic peptidomimetic, having growth factor receptor-binding capability, according to claim 17, comprising at least one biomaterial-affinity-containing group, wherein said at least one biomaterial-affinity-containing group provides said cyclic peptide or a cyclic peptidomimetic, with the ability to covalently or non-covalently interact with a biomaterial.

110. A functionalized biomaterial comprising at least one cyclic peptide or a cyclic peptidomimetic according to claim 15, and a biomaterial.

111. A functionalized biomaterial comprising at least one cyclic peptide or a cyclic peptidomimetic according to claim 17, and a biomaterial.

112. A medical device comprising at least one cyclic peptide or cyclic peptidomimetic according to claim 15.

113. A medical device comprising at least one cyclic peptide or cyclic peptidomimetic according to claim 17.

114. A medical device comprising at least one functionalized biomaterial according to claim 61.

115. A medical composition comprising at least one cyclic peptide or cyclic peptidomimetic according to claim 15, and a medically acceptable carrier.

116. A medical composition comprising at least one cyclic peptide or cyclic peptidomimetic according to claim 17, and a medically acceptable carrier.

117. A medical composition comprising at least one functionalized biomaterial according to claim 61, and a medically acceptable carrier.

The application's sequence listing, which the Patent Office published only in electronic form, follows.

SEQUENCE LISTING (12568 sequences)

SEQ ID NO: 1 - protein, 24 aa, Artificial Sequence
  Cyclic GFR-binding peptide
DEYDKSAISTLYLDEYDKGGGGGG

SEQ ID NO: 2 - protein, 20 aa, Artificial Sequence
  Cyclic GFR-binding peptide
GTPGPSAISTLYLDDMGVGG

SEQ ID NO: 3 - protein, 24 aa, Artificial Sequence
  Cyclic GFR-binding peptide
IGKTPSAISTLYLIGKTPGGGGGG

SEQ ID NO: 4 - protein, 19 aa, Artificial Sequence
  Cyclic GFR-binding peptide
NAISVLYFDENEKGGGGGG

SEQ ID NO: 5 - protein, 24 aa, Artificial Sequence
  Cyclic GFR-binding peptide
DSSNNSATSVLYYDSSNNGGGGGG

SEQ ID NO: 6 - protein, 23 aa, Artificial Sequence
  Cyclic GFR-binding peptide
SAISTLYLEIVRKKPLAAAAAAA

SEQ ID NO: 7 - protein, 16 aa, Artificial Sequence
  Cyclic GFR-binding peptide
NAISVLYFGGGGGGGG

SEQ ID NO: 8 - protein, 19 aa, Artificial Sequence
  Cyclic GFR-binding peptide
SATSVLYYGGGLRKHRGGG

SEQ ID NO: 9 - protein, 26 aa, Artificial Sequence
  Cyclic GFR-binding peptide
WWFWGGGSAISTLYLIGKTPGGGGGG

SEQ ID NO: 10 - protein, 27 aa, Artificial Sequence
  Cyclic GFR-binding peptide
GTPGPGGGSAISTLYLIGKTPGGGGGG

SEQ ID NO: 11 - protein, 27 aa, Artificial Sequence
  Cyclic GFR-binding peptide
GTPGPGGGNAISVLYFDENEKGGGGGG

SEQ ID NO: 12 - protein, 21 aa, Artificial Sequence
  Cyclic GFR-binding peptide
GTPGPGGGSAISMLYLGGGGG

SEQ ID NO: 13 - protein, 21 aa, Artificial Sequence
  Cyclic GFR-binding peptide
GTPGPSPISTLYKGGGGGGGG

SEQ ID NO: 14 - protein, 26 aa, Artificial Sequence
  Cyclic GFR-binding peptide
GTPGPGGNAISMLYFVGRKPGGGGGG

SEQ ID NO: 15 - protein, 26 aa, Artificial Sequence
  Cyclic GFR-binding peptide
GTPGPGGNAISTLYLDENEKGGGGGG

SEQ ID NO: 16 - protein, 26 aa, Artificial Sequence
  Cyclic GFR-binding peptide
GTPGPGGSAISTLYLDDSSNGGGGGG

SEQ ID NO: 17 - protein, 26 aa, Artificial Sequence
  Cyclic GFR-binding peptide
GTPGPGGNAISTLYLDDSSNGGGGGG

SEQ ID NO: 18 - protein, 22 aa, Artificial Sequence
  Cyclic GFR-binding peptide
GTPGPGGSAISTLYLGGGGGGG

SEQ ID NO: 19 - protein, 26 aa, Artificial Sequence
  Cyclic GFR-binding peptide
WWFWGGGSAISTLYLDEYDKGGGGGG

SEQ ID NO: 20 - protein, 20 aa, Artificial Sequence
  Cyclic GFR-binding peptide
GTPGPSAISTLYLGGGGGGG

SEQ ID NO: 21 - protein, 26 aa, Artificial Sequence
  Cyclic GFR-binding peptide
GTPGPGGSATSVLYYDDSSNGGGGGG

SEQ ID NO: 22 - protein, 21 aa, Artificial Sequence
  Cyclic GFR-binding peptide
GTPGPGGSAISMLYLGGGGGG

SEQ ID NO: 23 - protein, 25 aa, Artificial Sequence
  Cyclic GFR-binding peptide
VGRKPELEPLPIVYYVGRKPGGGGG

SEQ ID NO: 24 - protein, 21 aa, Artificial Sequence
  Cyclic GFR-binding peptide
EPLPIVYYVGRTPKVGGGGGG

SEQ ID NO: 25 - protein, 19 aa, Artificial Sequence
  Cyclic GFR-binding peptide
EPLPIVYYVGRTPGGGGGG

SEQ ID NO: 26 - protein, 23 aa, Artificial Sequence
  Cyclic GFR-binding peptide
RSVKVAKVRIKPHQGQHGGGGGG

SEQ ID NO: 27 - protein, 20 aa, Artificial Sequence
  Cyclic GFR-binding peptide
SNITMQIMRIKPHQGGGGGG

SEQ ID NO: 28 - protein, 24 aa, Artificial Sequence
  Cyclic GFR-binding peptide
EYVRKRPVQVRKIEYVRKGGGGGG

SEQ ID NO: 29 - protein, 24 aa, Artificial Sequence
  Cyclic GFR-binding peptide
DENKNSSLSILFFDENKNGGGGGG

SEQ ID NO: 30 - protein, 24 aa, Artificial Sequence
  Cyclic GFR-binding peptide
DENEKSSLSILFFDENEKGGGGGG

SEQ ID NO: 31 - protein, 24 aa, Artificial Sequence
  Cyclic GFR-binding peptide
DAANNSPISILYIDAANNGGGGGG

SEQ ID NO: 32 - protein, 16 aa, Artificial Sequence
  Cyclic GFR-binding peptide
SPISILYIGGGGGGGG

SEQ ID NO: 33 - protein, 24 aa, Artificial Sequence
  Cyclic GFR-binding peptide
DDSSNSPISLLYIDAANNGGGGGG

SEQ ID NO: 34 - protein, 15 aa, Artificial Sequence
  Cyclic GFR-binding peptide
NAISVLYFGGGGGGG

SEQ ID NO: 35 - protein, 21 aa, Artificial Sequence
  Cyclic GFR-binding peptide
EPLPIVYYVGRKPKVGGGGGG

SEQ ID NO: 36 - protein, 19 aa, Artificial Sequence
  Cyclic GFR-binding peptide
EPLPIVYYDDSSNGGGGGG

SEQ ID NO: 37 - protein, 21 aa, Artificial Sequence
  Cyclic GFR-binding peptide
EPLPIVYYDDSSNGGGGGGGG

SEQ ID NO: 38 - protein, 19 aa, Artificial Sequence
  Cyclic GFR-binding peptide
SPISILYIDAANNGGGGGG

SEQ ID NO: 39 - protein, 19 aa, Artificial Sequence
  Cyclic GFR-binding peptide
NAISTLYFDDSSNGGGGGG

SEQ ID NO: 40 - protein, 23 aa, Artificial Sequence
  Cyclic GFR-binding peptide
KLSAISTLYLEIVRKKPGGGGGG

SEQ ID NO: 41 - protein, 19 aa, Artificial Sequence
  Cyclic GFR-binding peptide
SPINMLYFNEKNQGGGGGG

SEQ ID NO: 42 - protein, 19 aa, Artificial Sequence
  Cyclic GFR-binding peptide
EPLPIVYYDDSSNGGGGGG

SEQ ID NO: 43 - protein, 16 aa, Artificial Sequence
  Cyclic GFR-binding peptide
SAISMLFLGGGGGGGG

SEQ ID NO: 44 - protein, 19 aa, Artificial Sequence
  Cyclic GFR-binding peptide
SPINILFFDENKNGGGGGG

SEQ ID NO: 45 - protein, 19 aa, Artificial Sequence
  Cyclic GFR-binding peptide
SNITMQIMIGKTPGGGGGG

SEQ ID NO: 46 - protein, 19 aa, Artificial Sequence
  Cyclic GFR-binding peptide
SAISTLYLIGKTPKILKNY

SEQ ID NO: 47 - protein, 24 aa, Artificial Sequence
  Cyclic GFR-binding peptide
WWFWGSAISTLYLIGKTPKILKNY

SEQ ID NO: 48 - protein, 24 aa, Artificial Sequence
  Cyclic GFR-binding peptide
GTPGPSAISTLYLIGKTPKILKNY

SEQ ID NO: 49 - protein, 21 aa, Artificial Sequence
  Cyclic GFR-binding peptide
EPLPIVYYVGRTPKVEQLSGG

SEQ ID NO: 50 - protein, 24 aa, Artificial Sequence
  Cyclic GFR-binding peptide
GGGGGGKDYEDLYLTSIASKDYED

SEQ ID NO: 51 - protein, 20 aa, Artificial Sequence
  Cyclic GFR-binding peptide
GGVGMDDLYLTSIASPGPTG

SEQ ID NO: 52 - protein, 24 aa, Artificial Sequence
  Cyclic GFR-binding peptide
GGGGGGPTKGILYLTSIASPTKGI

SEQ ID NO: 53 - protein, 19 aa, Artificial Sequence
  Cyclic GFR-binding peptide
GGGGGGKENEDFYLVSIAN

SEQ ID NO: 54 - protein, 24 aa, Artificial Sequence
  Cyclic GFR-binding peptide
GGGGGGNNSSDYYLVSTASNNSSD

SEQ ID NO: 55 - protein, 23 aa, Artificial Sequence
  Cyclic GFR-binding peptide
AAAAAAALPKKRVIELYLTSIAS

SEQ ID NO: 56 - protein, 16 aa, Artificial Sequence
  Cyclic GFR-binding peptide
GGGGGGGGFYLVSIAN

SEQ ID NO: 57 - protein, 19 aa, Artificial Sequence
  Cyclic GFR-binding peptide
GGGRHKRLGGGYYLVSTAS

SEQ ID NO: 58 - protein, 26 aa, Artificial Sequence
  Cyclic GFR-binding peptide
GGGGGGPTKGILYLTSIASGGGWFWW

SEQ ID NO: 59 - protein, 27 aa, Artificial Sequence
  Cyclic GFR-binding peptide
GGGGGGPTKGILYLTSIASGGGPGPTG

SEQ ID NO: 60 - protein, 27 aa, Artificial Sequence
  Cyclic GFR-binding peptide
GGGGGGKENEDFYLVSIANGGGPGPTG

SEQ ID NO: 61 - protein, 21 aa, Artificial Sequence
  Cyclic GFR-binding peptide
GGGGGLYLMSIASGGGPGPTG

SEQ ID NO: 62 - protein, 21 aa, Artificial Sequence
  Cyclic GFR-binding peptide
GGGGGGGGKYLTSIPSPGPTG

SEQ ID NO: 63 - protein, 26 aa, Artificial Sequence
  Cyclic GFR-binding peptide
GGGGGGPKRGVFYLMSIANGGPGPTG

SEQ ID NO: 64 - protein, 26 aa, Artificial Sequence
  Cyclic GFR-binding peptide
GGGGGGKENEDLYLTSIANGGPGPTG

SEQ ID NO: 65 - protein, 26 aa, Artificial Sequence
  Cyclic GFR-binding peptide
GGGGGGNSSDDLYLTSIASGGPGPTG

SEQ ID NO: 66 - protein, 26 aa, Artificial Sequence
  Cyclic GFR-binding peptide
GGGGGGNSSDDLYLTSIANGGPGPTG

SEQ ID NO: 67 - protein, 22 aa, Artificial Sequence
  Cyclic GFR-binding peptide
GGGGGGGLYLTSIASGGPGPTG

SEQ ID NO: 68 - protein, 26 aa, Artificial Sequence
  Cyclic GFR-binding peptide
GGGGGGKDYEDLYLTSIASGGGWFWW

SEQ ID NO: 69 - protein, 20 aa, Artificial Sequence
  Cyclic GFR-binding peptide
GGGGGGGLYLTSIASPGPTG

SEQ ID NO: 70 - protein, 26 aa, Artificial Sequence
  Cyclic GFR-binding peptide
GGGGGGNSSDDYYLVSTASGGPGPTG

SEQ ID NO: 71 - protein, 21 aa, Artificial Sequence
  Cyclic GFR-binding peptide
GGGGGGLYLMSIASGGPGPTG

SEQ ID NO: 72 - protein, 25 aa, Artificial Sequence
  Cyclic GFR-binding peptide
GGGGGPKRGVYYVIPLPELEPKRGV

SEQ ID NO: 73 - protein, 21 aa, Artificial Sequence
  Cyclic GFR-binding peptide
GGGGGGVKPTRGVYYVIPLPE

SEQ ID NO: 74 - protein, 19 aa, Artificial Sequence
  Cyclic GFR-binding peptide
GGGGGGPTRGVYYVIPLPE

SEQ ID NO: 75 - protein, 23 aa, Artificial Sequence
  Cyclic GFR-binding peptide
GGGGGGHQGQHPKIRVKAVKVSR

SEQ ID NO: 76 - protein, 20 aa, Artificial Sequence
  Cyclic GFR-binding peptide
GGGGGGQHPKIRMIQMTINS

SEQ ID NO: 77 - protein, 24 aa, Artificial Sequence
  Cyclic GFR-binding peptide
GGGGGGKRVYEIKRVQVPRKRVYE

SEQ ID NO: 78 - protein, 24 aa, Artificial Sequence
  Cyclic GFR-binding peptide
GGGGGGNKNEDFFLISLSSNKNED

SEQ ID NO: 79 - protein, 24 aa, Artificial Sequence
  Cyclic GFR-binding peptide
GGGGGGKENEDFFLISLSSKENED

SEQ ID NO: 80 - protein, 24 aa, Artificial Sequence
  Cyclic GFR-binding peptide
GGGGGGNNAADIYLISIPSNNAAD

SEQ ID NO: 81 - protein, 16 aa, Artificial Sequence
  Cyclic GFR-binding peptide
GGGGGGGGIYLISIPS

SEQ ID NO: 82 - protein, 24 aa, Artificial Sequence
  Cyclic GFR-binding peptide
GGGGGGNNAADIYLLSIPSNSSDD

SEQ ID NO: 83 - protein, 15 aa, Artificial Sequence
  Cyclic GFR-binding peptide
GGGGGGGFYLVSIAN

SEQ ID NO: 84 - protein, 21 aa, Artificial Sequence
  Cyclic GFR-binding peptide
GGGGGGVKPKRGVYYVIPLPE

SEQ ID NO: 85 - protein, 19 aa, Artificial Sequence
  Cyclic GFR-binding peptide
GGGGGGNSSDDYYVIPLPE

SEQ ID NO: 86 - protein, 21 aa, Artificial Sequence
  Cyclic GFR-binding peptide
GGGGGGGGNSSDDYYVIPLPE

SEQ ID NO: 87 - protein, 19 aa, Artificial Sequence
  Cyclic GFR-binding peptide
GGGGGGNNAADIYLISIPS

SEQ ID NO: 88 - protein, 19 aa, Artificial Sequence
  Cyclic GFR-binding peptide
GGGGGGNSSDDFYLTSIAN

SEQ ID NO: 89 - protein, 23 aa, Artificial Sequence
  Cyclic GFR-binding peptide
GGGGGGPKKRVIELYLTSIASLK

SEQ ID NO: 90 - protein, 19 aa, Artificial Sequence
  Cyclic GFR-binding peptide
GGGGGGQNKENFYLMNIPS

SEQ ID NO: 91 - protein, 19 aa, Artificial Sequence
  Cyclic GFR-binding peptide
GGGGGGNSSDDYYVIPLPE

SEQ ID NO: 92 - protein, 16 aa, Artificial Sequence
  Cyclic GFR-binding peptide
GGGGGGGGLFLMSIAS

SEQ ID NO: 93 - protein, 19 aa, Artificial Sequence
  Cyclic GFR-binding peptide
GGGGGGNKNEDFFLINIPS

SEQ ID NO: 94 - protein, 19 aa, Artificial Sequence
  Cyclic GFR-binding peptide
GGGGGGPTKGIMIQMTINS

SEQ ID NO: 95 - protein, 19 aa, Artificial Sequence
  Cyclic GFR-binding peptide
YNKLIKPTKGILYLTSIAS

SEQ ID NO: 96 - protein, 24 aa, Artificial Sequence
  Cyclic GFR-binding peptide
YNKLIKPTKGILYLTSIASGWFWW

SEQ ID NO: 97 - protein, 24 aa, Artificial Sequence
  Cyclic GFR-binding peptide
YNKLIKPTKGILYLTSIASPGPTG

SEQ ID NO: 98 - protein, 21 aa, Artificial Sequence
  Cyclic GFR-binding peptide
GGSLQEVKPTRGVYYVIPLPE

SEQ ID NO: 99 - protein, 27 aa, Artificial Sequence
  Cyclic GFR-binding peptide
WWFWGVPTKMSAISMLYLDENEKGGGG

SEQ ID NO: 100 - protein, 29 aa, Artificial Sequence
  Cyclic GFR-binding peptide
GTPGPVPTKLSAISMLYLDENKNGGGGGG

SEQ ID NO: 101 - protein, 28 aa, Artificial Sequence
  Cyclic GFR-binding peptide
WWFWGGVPTQLSAISMLYLDEYDKAAAA

SEQ ID NO: 102 - protein, 30 aa, Artificial Sequence
  Cyclic GFR-binding peptide
GTPGPGVPTRLSAISMLYLDDSSNAAAAAA

SEQ ID NO: 103 - protein, 29 aa, Artificial Sequence
  Cyclic GFR-binding peptide
WWFWGGGVPTKTSAISMLYLDDSSNGGGG

SEQ ID NO: 104 - protein, 31 aa, Artificial Sequence
  Cyclic GFR-binding peptide
GTPGPGGVPTALSAISMLYLDDSSNGGGGGG

SEQ ID NO: 105 - protein, 30 aa, Artificial Sequence
  Cyclic GFR-binding peptide
WWFWGGGGVPTDLSAISMLYLDSSNNAAAA

SEQ ID NO: 106 - protein, 32 aa, Artificial Sequence
  Cyclic GFR-binding peptide
GTPGPGGGVPEKMSAISMLYLDDMGVAAAAAA

SEQ ID NO: 107 - protein, 27 aa, Artificial Sequence
  Cyclic GFR-binding peptide
WWFWGAPTKLSAISMLYLDKGVVGGGG

SEQ ID NO: 108 - protein, 29 aa, Artificial Sequence
  Cyclic GFR-binding peptide
GTPGPAPTQLSAISMLYLNDKQQGGGGGG

SEQ ID NO: 109 - protein, 28 aa, Artificial Sequence
  Cyclic GFR-binding peptide
WWFWGGTPTKMSAISMLYLDAANNAAAA

SEQ ID NO: 110 - protein, 30 aa, Artificial Sequence
  Cyclic GFR-binding peptide
GTPGPGVPARLSAISMLYLDSANNAAAAAA

SEQ ID NO: 111 - protein, 29 aa, Artificial Sequence
  Cyclic GFR-binding peptide
WWFWGGGAPVKTSAISMLYLDDSSNGGGG

SEQ ID NO: 112 - protein, 31 aa, Artificial Sequence
  Cyclic GFR-binding peptide
GTPGPGGVPQALSAISMLYLDNGRVGGGGGG

SEQ ID NO: 113 - protein, 30 aa, Artificial Sequence
  Cyclic GFR-binding peptide
WWFWGGGGVSQDLSAISMLYLVGRKPAAAA

SEQ ID NO: 114 - protein, 32 aa, Artificial Sequence
  Cyclic GFR-binding peptide
GTPGPGGGVPQDLSAISMLYLIGKTPAAAAAA

SEQ ID NO: 115 - protein, 27 aa, Artificial Sequence
  Cyclic GFR-binding peptide
WWFWGSRVHHSAISMLYLVGRTPGGGG

SEQ ID NO: 116 - protein, 29 aa, Artificial Sequence
  Cyclic GFR-binding peptide
GTPGPTQVQLSAISMLYLRIKPHGGGGGG

SEQ ID NO: 117 - protein, 28 aa, Artificial Sequence
  Cyclic GFR-binding peptide
WWFWGGVPEELSSLSILFFRIKPHAAAA

SEQ ID NO: 118 - protein, 30 aa, Artificial Sequence
  Cyclic GFR-binding peptide
GTPGPGVPEKLSSLSILFFRIKPHAAAAAA

SEQ ID NO: 119 - protein, 29 aa, Artificial Sequence
  Cyclic GFR-binding peptide
WWFWGGGVPEQLSSLSILFFRIKPHGGGG

SEQ ID NO: 120 - protein, 31 aa, Artificial Sequence
  Cyclic GFR-binding peptide
GTPGPGGVPEKMSSLSILFFEYVRKGGGGGG

SEQ ID NO: 121 - protein, 30 aa, Artificial Sequence
  Cyclic GFR-binding peptide
WWFWGGGGVPERLSSLSILFFEIVRKAAAA

SEQ ID NO: 122 - protein, 30 aa, Artificial Sequence
  Cyclic GFR-binding peptide
GTPGPGGGVPEKTSSLSILFFDENEKGGGG

SEQ ID NO: 123 - protein, 29 aa, Artificial Sequence
  Cyclic GFR-binding peptide
WWFWGVPEALSSLSILFFDENKNGGGGGG

SEQ ID NO: 124 - protein, 27 aa, Artificial Sequence
  Cyclic GFR-binding peptide
GTPGPVPEDLSSLSILFFDEYDKAAAA

SEQ ID NO: 125 - protein, 30 aa, Artificial Sequence
  Cyclic GFR-binding peptide
WWFWGGVPTELSSLSILFFDDSSNAAAAAA

SEQ ID NO: 126 - protein, 28 aa, Artificial Sequence
  Cyclic GFR-binding peptide
GTPGPGAPTKLSSLSILFFDDSSNGGGG

SEQ ID NO: 127 - protein, 31 aa, Artificial Sequence
  Cyclic GFR-binding peptide
WWFWGGGAPTQLSSLSILFFDDSSNGGGGGG

SEQ ID NO: 128 - protein, 29 aa, Artificial Sequence
  Cyclic GFR-binding peptide
GTPGPGGVPTKLSSLSILFFDSSNNAAAA

SEQ ID NO: 129 - protein, 32 aa, Artificial Sequence
  Cyclic GFR-binding peptide
WWFWGGGGTPTKMSSLSILFFDDMGVAAAAAA

SEQ ID NO: 130 - protein, 30 aa, Artificial Sequence
  Cyclic GFR-binding peptide
GTPGPGGGVPARLSSLSILFFDKGVVGGGG

SEQ ID NO: 131 - protein, 29 aa, Artificial Sequence
  Cyclic GFR-binding peptide
WWFWGVPTRLSSLSILFFNDKQQGGGGGG

SEQ ID NO: 132 - protein, 27 aa, Artificial Sequence
  Cyclic GFR-binding peptide
GTPGPAPVKTSSLSILFFDAANNAAAA

SEQ ID NO: 133 - protein, 30 aa, Artificial Sequence
  Cyclic GFR-binding peptide
WWFWGGVPQALSSLSILFFDSANNAAAAAA

SEQ ID NO: 134 - protein, 28 aa, Artificial Sequence
  Cyclic GFR-binding peptide
GTPGPGVSQDLSSLSILFFDDSSNGGGG

SEQ ID NO: 135 - protein, 31 aa, Artificial Sequence
  Cyclic GFR-binding peptide
WWFWGGGVPQDLSSLSILFFDNGRVGGGGGG

SEQ ID NO: 136 - protein, 29 aa, Artificial Sequence
  Cyclic GFR-binding peptide
GTPGPGGVPTEESSLSILFFVGRKPAAAA

SEQ ID NO: 137 - protein, 32 aa, Artificial Sequence
  Cyclic GFR-binding peptide
WWFWGGGGVPTGQSSLSILFFIGKTPAAAAAA

SEQ ID NO: 138 - protein, 30 aa, Artificial Sequence
  Cyclic GFR-binding peptide
GTPGPGGGSRVHHSSLSILFFVGRTPGGGG

SEQ ID NO: 139 - protein, 29 aa, Artificial Sequence
  Cyclic GFR-binding peptide
WWFWGTQVQLSSLSILFFRIKPHGGGGGG

SEQ ID NO: 140 - protein, 27 aa, Artificial Sequence
  Cyclic GFR-binding peptide
GTPGPAPTELNAISVLYFRIKPHAAAA

SEQ ID NO: 141 - protein, 30 aa, Artificial Sequence
  Cyclic GFR-binding peptide
WWFWGGAPTKMNAISVLYFRIKPHAAAAAA

SEQ ID NO: 142 - protein, 28 aa, Artificial Sequence
  Cyclic GFR-binding peptide
GTPGPGAPTKLNAISVLYFRIKPHGGGG

SEQ ID NO: 143 - protein, 31 aa, Artificial Sequence
  Cyclic GFR-binding peptide
WWFWGGGAPTRLNAISVLYFEYVRKGGGGGG

SEQ ID NO: 144 - protein, 29 aa, Artificial Sequence
  Cyclic GFR-binding peptide
GTPGPGGAPTKTNAISVLYFEIVRKAAAA

SEQ ID NO: 145 - protein, 30 aa, Artificial Sequence
  Cyclic GFR-binding peptide
WWFWGGGGAPTALNAISVLYFDENEKGGGG

SEQ ID NO: 146 - protein, 32 aa, Artificial Sequence
  Cyclic GFR-binding peptide
GTPGPGGGAPTDLNAISVLYFDENKNGGGGGG

SEQ ID NO: 147 - protein, 27 aa, Artificial Sequence
  Cyclic GFR-binding peptide
WWFWGVPTELNAISVLYFDEYDKAAAA

SEQ ID NO: 148 - protein, 29 aa, Artificial Sequence
  Cyclic GFR-binding peptide
GTPGPVPEKMNAISVLYFDDSSNAAAAAA

SEQ ID NO: 149 - protein, 28 aa, Artificial Sequence
  Cyclic GFR-binding peptide
WWFWGGVPTKLNAISVLYFDDSSNGGGG

SEQ ID NO: 150 - protein, 30 aa, Artificial Sequence
  Cyclic GFR-binding peptide
GTPGPGTPTKMNAISVLYFDDSSNGGGGGG

SEQ ID NO: 151 - protein, 29 aa, Artificial Sequence
  Cyclic GFR-binding peptide
WWFWGGGVPARLNAISVLYFDSSNNAAAA

SEQ ID NO: 152 - protein, 31 aa, Artificial Sequence
  Cyclic GFR-binding peptide
GTPGPGGVPTRLNAISVLYFDDMGVAAAAAA

SEQ ID NO: 153 - protein, 30 aa, Artificial Sequence
  Cyclic GFR-binding peptide
WWFWGGGGAPVKTNAISVLYFDKGVVGGGG

SEQ ID NO: 154 - protein, 32 aa, Artificial Sequence
  Cyclic GFR-binding peptide
GTPGPGGGVPQALNAISVLYFNDKQQGGGGGG

SEQ ID NO: 155 - protein, 27 aa, Artificial Sequence
  Cyclic GFR-binding peptide
WWFWGVSQDLNAISVLYFDAANNAAAA

SEQ ID NO: 156 - protein, 29 aa, Artificial Sequence
  Cyclic GFR-binding peptide
GTPGPVPQDLNAISVLYFDSANNAAAAAA

SEQ ID NO: 157 - protein, 28 aa, Artificial Sequence
  Cyclic GFR-binding peptide
WWFWGGVPTEENAISVLYFDDSSNGGGG

SEQ ID NO: 158 - protein, 30 aa, Artificial Sequence
  Cyclic GFR-binding peptide
GTPGPGVPTGQNAISVLYFDNGRVGGGGGG

SEQ ID NO: 159 - protein, 29 aa, Artificial Sequence
  Cyclic GFR-binding peptide
WWFWGGGSRVHHNAISVLYFVGRKPAAAA

SEQ ID NO: 160 - protein, 31 aa, Artificial Sequence
  Cyclic GFR-binding peptide
GTPGPGGTQVQLNAISVLYFIGKTPAAAAAA

SEQ ID NO: 161 - protein, 30 aa, Artificial Sequence
  Cyclic GFR-binding peptide
WWFWGGGGAPTELSATSVLYYVGRTPGGGG

SEQ ID NO: 162 - protein, 32 aa, Artificial Sequence
  Cyclic GFR-binding peptide
GTPGPGGGAPTKMSATSVLYYRIKPHGGGGGG

SEQ ID NO: 163 - protein, 27 aa, Artificial Sequence
  Cyclic GFR-binding peptide
WWFWGAPTKLSATSVLYYRIKPHAAAA

SEQ ID NO: 164 - protein, 29 aa, Artificial Sequence
  Cyclic GFR-binding peptide
GTPGPAPTQLSATSVLYYRIKPHAAAAAA

SEQ ID NO: 165 - protein, 28 aa, Artificial Sequence
  Cyclic GFR-binding peptide
WWFWGGAPTRLSATSVLYYRIKPHGGGG

SEQ ID NO: 166 - protein, 30 aa, Artificial Sequence
  Cyclic GFR-binding peptide
GTPGPGAPTKTSATSVLYYEYVRKGGGGGG

SEQ ID NO: 167 - protein, 29 aa, Artificial Sequence
  Cyclic GFR-binding peptide
WWFWGGGAPTALSATSVLYYEIVRKAAAA

SEQ ID NO: 168 - protein, 29 aa, Artificial Sequence
  Cyclic GFR-binding peptide
GTPGPGGAPTDLSATSVLYYDENEKGGGG

SEQ ID NO: 169 - protein, 32 aa, Artificial Sequence
  Cyclic GFR-binding peptide
WWFWGGGGVPTELSATSVLYYDENKNGGGGGG

SEQ ID NO: 170 - protein, 30 aa, Artificial Sequence
  Cyclic GFR-binding peptide
GTPGPGGGVPEKMSATSVLYYDEYDKAAAA

SEQ ID NO: 171 - protein, 29 aa, Artificial Sequence
  Cyclic GFR-binding peptide
WWFWGVPTKLSATSVLYYDDSSNAAAAAA

SEQ ID NO: 172 - protein, 27 aa, Artificial Sequence
  Cyclic GFR-binding peptide
GTPGPTPTKMSATSVLYYDDSSNGGGG

SEQ ID NO: 173 - protein, 30 aa, Artificial Sequence
  Cyclic GFR-binding peptide
WWFWGGVPARLSATSVLYYDDSSNGGGGGG

SEQ ID NO: 174 - protein, 28 aa, Artificial Sequence
  Cyclic GFR-binding peptide
GTPGPGVPTRLSATSVLYYDSSNNAAAA

SEQ ID NO: 175 - protein, 31 aa, Artificial Sequence
  Cyclic GFR-binding peptide
WWFWGGGAPVKTSATSVLYYDDMGVAAAAAA

SEQ ID NO: 176 - protein, 29 aa, Artificial Sequence
  Cyclic GFR-binding peptide
GTPGPGGVPQALSATSVLYYDKGVVGGGG

SEQ ID NO: 177 - protein, 32 aa, Artificial Sequence
  Cyclic GFR-binding peptide
WWFWGGGGVSQDLSATSVLYYNDKQQGGGGGG

SEQ ID NO: 178 - protein, 30 aa, Artificial Sequence
  Cyclic GFR-binding peptide
GTPGPGGGVPQDLSATSVLYYDAANNAAAA

SEQ ID NO: 179 - protein, 29 aa, Artificial Sequence
  Cyclic GFR-binding peptide
WWFWGVPTEESATSVLYYDSANNAAAAAA

SEQ ID NO: 180 - protein, 27 aa, Artificial Sequence
  Cyclic GFR-binding peptide
GTPGPVPTGQSATSVLYYDDSSNGGGG

SEQ ID NO: 181 - protein, 30 aa, Artificial Sequence
  Cyclic GFR-binding peptide
WWFWGGSRVHHSATSVLYYDNGRVGGGGGG

SEQ ID NO: 182 - protein, 28 aa, Artificial Sequence
  Cyclic GFR-binding peptide
GTPGPGTQVQLSATSVLYYVGRKPAAAA

SEQ ID NO: 183 - protein, 31 aa, Artificial Sequence
  Cyclic GFR-binding peptide
WWFWGGGVPTELSPISVLYKIGKTPAAAAAA

SEQ ID NO: 184 - protein, 29 aa, Artificial Sequence
  Cyclic GFR-binding peptide
GTPGPGGVPTKMSPISVLYKVGRTPGGGG

SEQ ID NO: 185 - protein, 32 aa, Artificial Sequence
  Cyclic GFR-binding peptide
WWFWGGGGVPTKLSPISVLYKRIKPHGGGGGG

SEQ ID NO: 186 - protein, 30 aa, Artificial Sequence
  Cyclic GFR-binding peptide
GTPGPGGGVPTQLSPISVLYKRIKPHAAAA

SEQ ID NO: 187 - protein, 29 aa, Artificial Sequence
  Cyclic GFR-binding peptide
WWFWGVPTRLSPISVLYKRIKPHAAAAAA

SEQ ID NO: 188 - protein, 27 aa, Artificial Sequence
  Cyclic GFR-binding peptide
GTPGPVPTKTSPISVLYKRIKPHGGGG

SEQ ID NO: 189 - protein, 30 aa, Artificial Sequence
  Cyclic GFR-binding peptide
WWFWGGVPTALSPISVLYKEYVRKGGGGGG

SEQ ID NO: 190 - protein, 28 aa, Artificial Sequence
  Cyclic GFR-binding peptide
GTPGPGVPTDLSPISVLYKEIVRKAAAA

SEQ ID NO: 191 - protein, 29 aa, Artificial Sequence
  Cyclic GFR-binding peptide
WWFWGGGVPEKMSPISVLYKDENEKGGGG

SEQ ID NO: 192 - protein, 31 aa, Artificial Sequence
  Cyclic GFR-binding peptide
GTPGPGGAPTKLSPISVLYKDENKNGGGGGG

SEQ ID NO: 193 - protein, 30 aa, Artificial Sequence
  Cyclic GFR-binding peptide
WWFWGGGGAPTQLSPISVLYKDEYDKAAAA

SEQ ID NO: 194 - protein, 32 aa, Artificial Sequence
  Cyclic GFR-binding peptide
GTPGPGGGTPTKMSPISVLYKDDSSNAAAAAA

SEQ ID NO: 195 - protein, 27 aa, Artificial Sequence
  Cyclic GFR-binding peptide
WWFWGVPARLSPISVLYKDDSSNGGGG

SEQ ID NO: 196 - protein, 29 aa, Artificial Sequence
  Cyclic GFR-binding peptide
GTPGPAPVKTSPISVLYKDDSSNGGGGGG

SEQ ID NO: 197 - protein, 28 aa, Artificial Sequence
  Cyclic GFR-binding peptide
WWFWGGVPQALSPISVLYKDSSNNAAAA

SEQ ID NO: 198 - protein, 30 aa, Artificial Sequence
  Cyclic GFR-binding peptide
GTPGPGVSQDLSPISVLYKDDMGVAAAAAA

SEQ ID NO: 199 - protein, 29 aa, Artificial Sequence
  Cyclic GFR-binding peptide
WWFWGGGVPQDLSPISVLYKDKGVVGGGG

SEQ ID NO: 200 - protein, 31 aa, Artificial Sequence
  Cyclic GFR-binding peptide
GTPGPGGSRVHHSPISVLYKNDKQQGGGGGG

SEQ ID NO: 201 - protein, 30 aa, Artificial Sequence
  Cyclic GFR-binding peptide
WWFWGGGGTQVQLSPISVLYKDAANNAAAA

SEQ ID NO: 202 - protein, 32 aa, Artificial Sequence
  Cyclic GFR-binding peptide
GTPGPGGGVPTELEPISILYLDSANNAAAAAA

SEQ ID NO: 203 - protein, 27 aa, Artificial Sequence
  Cyclic GFR-binding peptide
WWFWGVPTKMEPISILYLDDSSNGGGG

SEQ ID NO: 204 - protein, 29 aa, Artificial Sequence
  Cyclic GFR-binding peptide
GTPGPVPTKLEPISILYLDNGRVGGGGGG

SEQ ID NO: 205 - protein, 28 aa, Artificial Sequence
  Cyclic GFR-binding peptide
WWFWGGVPTQLEPISILYLVGRKPAAAA

SEQ ID NO: 206 - protein, 30 aa, Artificial Sequence
  Cyclic GFR-binding peptide
GTPGPGVPTRLEPISILYLIGKTPAAAAAA

SEQ ID NO: 207 - protein, 29 aa, Artificial Sequence
  Cyclic GFR-binding peptide
WWFWGGGVPTKTEPISILYLVGRTPGGGG

SEQ ID NO: 208 - protein, 31 aa, Artificial Sequence
  Cyclic GFR-binding peptide
GTPGPGGVPTALEPISILYLRIKPHGGGGGG

SEQ ID NO: 209 - protein, 30 aa, Artificial Sequence
  Cyclic GFR-binding peptide
WWFWGGGGVPTDLEPISILYLRIKPHAAAA

SEQ ID NO: 210 - protein, 32 aa, Artificial Sequence
  Cyclic GFR-binding peptide
GTPGPGGGVPEKMEPISILYLRIKPHAAAAAA

SEQ ID NO: 211 - protein, 27 aa, Artificial Sequence
  Cyclic GFR-binding peptide
WWFWGAPTKLEPISILYLRIKPHGGGG

SEQ ID NO: 212 - protein, 29 aa, Artificial Sequence
  Cyclic GFR-binding peptide
GTPGPAPTQLEPISILYLEYVRKGGGGGG

SEQ ID NO: 213 - protein, 28 aa, Artificial Sequence
  Cyclic GFR-binding peptide
WWFWGGTPTKMEPISILYLEIVRKAAAA

SEQ ID NO: 214 - protein, 28 aa, Artificial Sequence
  Cyclic GFR-binding peptide
GTPGPGVPARLEPISILYLDENEKGGGG

SEQ ID NO: 215 - protein, 31 aa, Artificial Sequence
  Cyclic GFR-binding peptide
WWFWGGGAPVKTEPISILYLDENKNGGGGGG

SEQ ID NO: 216 - protein, 29 aa, Artificial Sequence
  Cyclic GFR-binding peptide
GTPGPGGVPQALEPISILYLDEYDKAAAA

SEQ ID NO: 217 - protein, 32 aa, Artificial Sequence
  Cyclic GFR-binding peptide
WWFWGGGGVSQDLEPISILYLDDSSNAAAAAA

SEQ ID NO: 218 - protein, 30 aa, Artificial Sequence
  Cyclic GFR-binding peptide
GTPGPGGGVPQDLEPISILYLDDSSNGGGG

SEQ ID NO: 219 - protein, 29 aa, Artificial Sequence
  Cyclic GFR-binding peptide
WWFWGSRVHHEPISILYLDDSSNGGGGGG

SEQ ID NO: 220 - protein, 27 aa, Artificial Sequence
  Cyclic GFR-binding peptide
GTPGPTQVQLEPISILYLDSSNNAAAA

SEQ ID NO: 221 - protein, 30 aa, Artificial Sequence
  Cyclic GFR-binding peptide
WWFWGGTPTELSPINMLYFDDMGVAAAAAA

SEQ ID NO: 222 - protein, 28 aa, Artificial Sequence
  Cyclic GFR-binding peptide
GTPGPGTPTKMSPINMLYFDKGVVGGGG

SEQ ID NO: 223 - protein, 31 aa, Artificial Sequence
  Cyclic GFR-binding peptide
WWFWGGGTPTKLSPINMLYFNDKQQGGGGGG

SEQ ID NO: 224 - protein, 29 aa, Artificial Sequence
  Cyclic GFR-binding peptide
GTPGPGGTPTQLSPINMLYFDAANNAAAA

SEQ ID NO: 225 - protein, 32 aa, Artificial Sequence
  Cyclic GFR-binding peptide
WWFWGGGGTPTRLSPINMLYFDSANNAAAAAA

SEQ ID NO: 226 - protein, 30 aa, Artificial Sequence
  Cyclic GFR-binding peptide
GTPGPGGGTPTKTSPINMLYFDDSSNGGGG

SEQ ID NO: 227 - protein, 29 aa, Artificial Sequence
  Cyclic GFR-binding peptide
WWFWGTPTALSPINMLYFDNGRVGGGGGG

SEQ ID NO: 228 - protein, 27 aa, Artificial Sequence
  Cyclic GFR-binding peptide
GTPGPTPTDLSPINMLYFVGRKPAAAA

SEQ ID NO: 229 - protein, 30 aa, Artificial Sequence
  Cyclic GFR-binding peptide
WWFWGGVPTELSPINMLYFIGKTPAAAAAA

SEQ ID NO: 230 - protein, 28 aa, Artificial Sequence
  Cyclic GFR-binding peptide
GTPGPGVPEKMSPINMLYFVGRTPGGGG

SEQ ID NO: 231 - protein, 31 aa, Artificial Sequence
  Cyclic GFR-binding peptide
WWFWGGGAPTKLSPINMLYFRIKPHGGGGGG

SEQ ID NO: 232 - protein, 29 aa, Artificial Sequence
  Cyclic GFR-binding peptide
GTPGPGGAPTQLSPINMLYFRIKPHAAAA

SEQ ID NO: 233 - protein, 32 aa, Artificial Sequence
  Cyclic GFR-binding peptide
WWFWGGGGVPTKLSPINMLYFRIKPHAAAAAA

SEQ ID NO: 234 - protein, 30 aa, Artificial Sequence
  Cyclic GFR-binding peptide
GTPGPGGGVPARLSPINMLYFRIKPHGGGG

SEQ ID NO: 235 - protein, 29 aa, Artificial Sequence
  Cyclic GFR-binding peptide
WWFWGVPTRLSPINMLYFEYVRKGGGGGG

SEQ ID NO: 236 - protein, 27 aa, Artificial Sequence
  Cyclic GFR-binding peptide
GTPGPAPVKTSPINMLYFEIVRKAAAA

SEQ ID NO: 237 - protein, 28 aa, Artificial Sequence
  Cyclic GFR-binding peptide
WWFWGGVPQALSPINMLYFDENEKGGGG

SEQ ID NO: 238 - protein, 30 aa, Artificial Sequence
  Cyclic GFR-binding peptide
GTPGPGVSQDLSPINMLYFDENKNGGGGGG

SEQ ID NO: 239 - protein, 29 aa, Artificial Sequence
  Cyclic GFR-binding peptide
WWFWGGGVPQDLSPINMLYFDEYDKAAAA

SEQ ID NO: 240 - protein, 31 aa, Artificial Sequence
  Cyclic GFR-binding peptide
GTPGPGGVPTEESPINMLYFDDSSNAAAAAA

SEQ ID NO: 241 - protein, 30 aa, Artificial Sequence
  Cyclic GFR-binding peptide
WWFWGGGGVPTGQSPINMLYFDDSSNGGGG

SEQ ID NO: 242 - protein, 32 aa, Artificial Sequence
  Cyclic GFR-binding peptide
GTPGPGGGSRVHHSPINMLYFDDSSNGGGGGG

SEQ ID NO: 243 - protein, 27 aa, Artificial Sequence
  Cyclic GFR-binding peptide
WWFWGTQVQLSPINMLYFDSSNNAAAA

SEQ ID NO: 244 - protein, 29 aa, Artificial Sequence
  Cyclic GFR-binding peptide
GTPGPVPAELSPISILYIDDMGVAAAAAA

SEQ ID NO: 245 - protein, 28 aa, Artificial Sequence
  Cyclic GFR-binding peptide
WWFWGGVPAKMSPISILYIDKGVVGGGG

SEQ ID NO: 246 - protein, 30 aa, Artificial Sequence
  Cyclic GFR-binding peptide
GTPGPGVPAKLSPISILYINDKQQGGGGGG

SEQ ID NO: 247 - protein, 29 aa, Artificial Sequence
  Cyclic GFR-binding peptide
WWFWGGGVPAQLSPISILYIDAANNAAAA

SEQ ID NO: 248 - protein, 31 aa, Artificial Sequence
  Cyclic GFR-binding peptide
GTPGPGGVPARLSPISILYIDSANNAAAAAA

SEQ ID NO: 249 - protein, 30 aa, Artificial Sequence
  Cyclic GFR-binding peptide
WWFWGGGGVPAKTSPISILYIDDSSNGGGG

SEQ ID NO: 250 - protein, 32 aa, Artificial Sequence
  Cyclic GFR-binding peptide
GTPGPGGGVPAALSPISILYIDNGRVGGGGGG

SEQ ID NO: 251 - protein, 27 aa, Artificial Sequence
  Cyclic GFR-binding peptide
WWFWGVPADLSPISILYIVGRKPAAAA

SEQ ID NO: 252 - protein, 29 aa, Artificial Sequence
  Cyclic GFR-binding peptide
GTPGPVPTELSPISILYIIGKTPAAAAAA

SEQ ID NO: 253 - protein, 28 aa, Artificial Sequence
  Cyclic GFR-binding peptide
WWFWGGVPEKMSPISILYIVGRTPGGGG

SEQ ID NO: 254 - protein, 30 aa, Artificial Sequence
  Cyclic GFR-binding peptide
GTPGPGAPTKLSPISILYIRIKPHGGGGGG

SEQ ID NO: 255 - protein, 29 aa, Artificial Sequence
  Cyclic GFR-binding peptide
WWFWGGGAPTQLSPISILYIRIKPHAAAA

SEQ ID NO: 256 - protein, 31 aa, Artificial Sequence
  Cyclic GFR-binding peptide
GTPGPGGVPTKLSPISILYIRIKPHAAAAAA

SEQ ID NO: 257 - protein, 30 aa, Artificial Sequence
  Cyclic GFR-binding peptide
WWFWGGGGTPTKMSPISILYIRIKPHGGGG

SEQ ID NO: 258 - protein, 32 aa, Artificial Sequence
  Cyclic GFR-binding peptide
GTPGPGGGVPTRLSPISILYIEYVRKGGGGGG

SEQ ID NO: 259 - protein, 27 aa, Artificial Sequence
  Cyclic GFR-binding peptide
WWFWGAPVKTSPISILYIEIVRKAAAA

SEQ ID NO: 260 - protein, 27 aa, Artificial Sequence
  Cyclic GFR-binding peptide
GTPGPVPQALSPISILYIDENEKGGGG

SEQ ID NO: 261 - protein, 30 aa, Artificial Sequence
  Cyclic GFR-binding peptide
WWFWGGVSQDLSPISILYIDENKNGGGGGG

SEQ ID NO: 262 - protein, 28 aa, Artificial Sequence
  Cyclic GFR-binding peptide
GTPGPGVPQDLSPISILYIDEYDKAAAA

SEQ ID NO: 263 - protein, 31 aa, Artificial Sequence
  Cyclic GFR-binding peptide
WWFWGGGVPTEESPISILYIDDSSNAAAAAA

SEQ ID NO: 264 - protein, 29 aa, Artificial Sequence
  Cyclic GFR-binding peptide
GTPGPGGVPTGQSPISILYIDDSSNGGGG

SEQ ID NO: 265 - protein, 32 aa, Artificial Sequence
  Cyclic GFR-binding peptide
WWFWGGGGSRVHHSPISILYIDDSSNGGGGGG

SEQ ID NO: 266 - protein, 30 aa, Artificial Sequence
  Cyclic GFR-binding peptide
GTPGPGGGTQVQLSPISILYIDSSNNAAAA

SEQ ID NO: 267 - protein, 29 aa, Artificial Sequence
  Cyclic GFR-binding peptide
WWFWGVPTELSPISILFIDDMGVAAAAAA

SEQ ID NO: 268 - protein, 27 aa, Artificial Sequence
  Cyclic GFR-binding peptide
GTPGPVPTKMSPISILFIDKGVVGGGG

SEQ ID NO: 269 - protein, 30 aa, Artificial Sequence
  Cyclic GFR-binding peptide
WWFWGGVPTKLSPISILFINDKQQGGGGGG

SEQ ID NO: 270 - protein, 28 aa, Artificial Sequence
  Cyclic GFR-binding peptide
GTPGPGVPTQLSPISILFIDAANNAAAA

SEQ ID NO: 271 - protein, 31 aa, Artificial Sequence
  Cyclic GFR-binding peptide
WWFWGGGVPTRLSPISILFIDSANNAAAAAA

SEQ ID NO: 272 - protein, 29 aa, Artificial Sequence
  Cyclic GFR-binding peptide
GTPGPGGVPTKTSPISILFIDDSSNGGGG

SEQ ID NO: 273 - protein, 32 aa, Artificial Sequence
  Cyclic GFR-binding peptide
WWFWGGGGVPTALSPISILFIDNGRVGGGGGG

SEQ ID NO: 274 - protein, 30 aa, Artificial Sequence
  Cyclic GFR-binding peptide
GTPGPGGGVPTDLSPISILFIVGRKPAAAA

SEQ ID NO: 275 - protein, 29 aa, Artificial Sequence
  Cyclic GFR-binding peptide
WWFWGVPEKMSPISILFIIGKTPAAAAAA

SEQ ID NO: 276 - protein, 27 aa, Artificial Sequence
  Cyclic GFR-binding peptide
GTPGPAPTKLSPISILFIVGRTPGGGG

SEQ ID NO: 277 - protein, 30 aa, Artificial Sequence
  Cyclic GFR-binding peptide
WWFWGGAPTQLSPISILFIRIKPHGGGGGG

SEQ ID NO: 278 - protein, 28 aa, Artificial Sequence
  Cyclic GFR-binding peptide
GTPGPGTPTKMSPISILFIRIKPHAAAA

SEQ ID NO: 279 - protein, 31 aa, Artificial Sequence
  Cyclic GFR-binding peptide
WWFWGGGVPARLSPISILFIRIKPHAAAAAA

SEQ ID NO: 280 - protein, 29 aa, Artificial Sequence
  Cyclic GFR-binding peptide
GTPGPGGAPVKTSPISILFIRIKPHGGGG

SEQ ID NO: 281 - protein, 32 aa, Artificial Sequence
  Cyclic GFR-binding peptide
WWFWGGGGVPQALSPISILFIEYVRKGGGGGG

SEQ ID NO: 282 - protein, 30 aa, Artificial Sequence
  Cyclic GFR-binding peptide
GTPGPGGGVSQDLSPISILFIEIVRKAAAA

SEQ ID NO: 283 - protein, 27 aa, Artificial Sequence
  Cyclic GFR-binding peptide
WWFWGVPQDLSPISILFIDENEKGGGG

SEQ ID NO: 284 - protein, 29 aa, Artificial Sequence
  Cyclic GFR-binding peptide
GTPGPSRVHHSPISILFIDENKNGGGGGG

SEQ ID NO: 285 - protein, 28 aa, Artificial Sequence
  Cyclic GFR-binding peptide
WWFWGGTQVQLSPISILFIDEYDKAAAA

SEQ ID NO: 286 - protein, 30 aa, Artificial Sequence
  Cyclic GFR-binding peptide
GTPGPGAPVELKPLSMLYVDDSSNAAAAAA

SEQ ID NO: 287 - protein, 29 aa, Artificial Sequence
  Cyclic GFR-binding peptide
WWFWGGGAPVKMKPLSMLYVDDSSNGGGG

SEQ ID NO: 288 - protein, 31 aa, Artificial Sequence
  Cyclic GFR-binding peptide
GTPGPGGAPVKLKPLSMLYVDDSSNGGGGGG

SEQ ID NO: 289 - protein, 30 aa, Artificial Sequence
  Cyclic GFR-binding peptide
WWFWGGGGAPVQLKPLSMLYVDSSNNAAAA

SEQ ID NO: 290 - protein, 32 aa, Artificial Sequence
  Cyclic GFR-binding peptide
GTPGPGGGAPVRLKPLSMLYVDDMGVAAAAAA

SEQ ID NO: 291 - protein, 27 aa, Artificial Sequence
  Cyclic GFR-binding peptide
WWFWGAPVALKPLSMLYVDKGVVGGGG

SEQ ID NO: 292 - protein, 29 aa, Artificial Sequence
  Cyclic GFR-binding peptide
GTPGPAPVDLKPLSMLYVNDKQQGGGGGG

SEQ ID NO: 293 - protein, 28 aa, Artificial Sequence
  Cyclic GFR-binding peptide
WWFWGGVPTELKPLSMLYVDAANNAAAA

SEQ ID NO: 294 - protein, 30 aa, Artificial Sequence
  Cyclic GFR-binding peptide
GTPGPGVPEKMKPLSMLYVDSANNAAAAAA

SEQ ID NO: 295 - protein, 29 aa, Artificial Sequence
  Cyclic GFR-binding peptide
WWFWGGGAPTKLKPLSMLYVDDSSNGGGG

SEQ ID NO: 296 - protein, 31 aa, Artificial Sequence
  Cyclic GFR-binding peptide
GTPGPGGAPTQLKPLSMLYVDNGRVGGGGGG

SEQ ID NO: 297 - protein, 30 aa, Artificial Sequence
  Cyclic GFR-binding peptide
WWFWGGGGVPTKLKPLSMLYVVGRKPAAAA

SEQ ID NO: 298 - protein, 32 aa, Artificial Sequence
  Cyclic GFR-binding peptide
GTPGPGGGTPTKMKPLSMLYVIGKTPAAAAAA

SEQ ID NO: 299 - protein, 27 aa, Artificial Sequence
  Cyclic GFR-binding peptide
WWFWGVPARLKPLSMLYVVGRTPGGGG

SEQ ID NO: 300 - protein, 29 aa, Artificial Sequence
  Cyclic GFR-binding peptide
GTPGPVPTRLKPLSMLYVRIKPHGGGGGG

SEQ ID NO: 301 - protein, 28 aa, Artificial Sequence
  Cyclic GFR-binding peptide
WWFWGGVPQALKPLSMLYVRIKPHAAAA

SEQ ID NO: 302 - protein, 30 aa, Artificial Sequence
  Cyclic GFR-binding peptide
GTPGPGVSQDLKPLSMLYVRIKPHAAAAAA

SEQ ID NO: 303 - protein, 29 aa, Artificial Sequence
  Cyclic GFR-binding peptide
WWFWGGGVPQDLKPLSMLYVRIKPHGGGG

SEQ ID NO: 304 - protein, 31 aa, Artificial Sequence
  Cyclic GFR-binding peptide
GTPGPGGVPTEEKPLSMLYVEYVRKGGGGGG

SEQ ID NO: 305 - protein, 30 aa, Artificial Sequence
  Cyclic GFR-binding peptide
WWFWGGGGVPTGQKPLSMLYVEIVRKAAAA

SEQ ID NO: 306 - protein, 30 aa, Artificial Sequence
  Cyclic GFR-binding peptide
GTPGPGGGSRVHHKPLSMLYVDENEKGGGG

SEQ ID NO: 307 - protein, 29 aa, Artificial Sequence
  Cyclic GFR-binding peptide
WWFWGTQVQLKPLSMLYVDENKNGGGGGG

SEQ ID NO: 308 - protein, 27 aa, Artificial Sequence
  Cyclic GFR-binding peptide
GTPGPVPQELEPLPIVYYDEYDKAAAA

SEQ ID NO: 309 - protein, 30 aa, Artificial Sequence
  Cyclic GFR-binding peptide
WWFWGGVPQKMEPLPIVYYDDSSNAAAAAA

SEQ ID NO: 310 - protein, 28 aa, Artificial Sequence
  Cyclic GFR-binding peptide
GTPGPGVPQKLEPLPIVYYDDSSNGGGG

SEQ ID NO: 311 - protein, 31 aa, Artificial Sequence
  Cyclic GFR-binding peptide
WWFWGGGVPQQLEPLPIVYYDDSSNGGGGGG

SEQ ID NO: 312 - protein, 29 aa, Artificial Sequence
  Cyclic GFR-binding peptide
GTPGPGGVPQRLEPLPIVYYDSSNNAAAA

SEQ ID NO: 313 - protein, 32 aa, Artificial Sequence
  Cyclic GFR-binding peptide
WWFWGGGGVPQKTEPLPIVYYDDMGVAAAAAA

SEQ ID NO: 314 - protein, 30 aa, Artificial Sequence
  Cyclic GFR-binding peptide
GTPGPGGGVPQDLEPLPIVYYDKGVVGGGG

SEQ ID NO: 315 - protein, 29 aa, Artificial Sequence
  Cyclic GFR-binding peptide
WWFWGVPTELEPLPIVYYNDKQQGGGGGG

SEQ ID NO: 316 - protein, 27 aa, Artificial Sequence
  Cyclic GFR-binding peptide
GTPGPVPEKMEPLPIVYYDAANNAAAA

SEQ ID NO: 317 - protein, 30 aa, Artificial Sequence
  Cyclic GFR-binding peptide
WWFWGGAPTKLEPLPIVYYDSANNAAAAAA

SEQ ID NO: 318 - protein, 28 aa, Artificial Sequence
  Cyclic GFR-binding peptide
GTPGPGAPTQLEPLPIVYYDDSSNGGGG

SEQ ID NO: 319 - protein, 31 aa, Artificial Sequence
  Cyclic GFR-binding peptide
WWFWGGGVPTKLEPLPIVYYDNGRVGGGGGG

SEQ ID NO: 320 - protein, 29 aa, Artificial Sequence
  Cyclic GFR-binding peptide
GTPGPGGTPTKMEPLPIVYYVGRKPAAAA

SEQ ID NO: 321 - protein, 32 aa, Artificial Sequence
  Cyclic GFR-binding peptide
WWFWGGGGVPARLEPLPIVYYIGKTPAAAAAA

SEQ ID NO: 322 - protein, 30 aa, Artificial Sequence
  Cyclic GFR-binding peptide
GTPGPGGGVPTRLEPLPIVYYVGRTPGGGG

SEQ ID NO: 323 - protein, 29 aa, Artificial Sequence
  Cyclic GFR-binding peptide
WWFWGAPVKTEPLPIVYYRIKPHGGGGGG

SEQ ID NO: 324 - protein, 27 aa, Artificial Sequence
  Cyclic GFR-binding peptide
GTPGPVSQDLEPLPIVYYRIKPHAAAA

SEQ ID NO: 325 - protein, 30 aa, Artificial Sequence
  Cyclic GFR-binding peptide
WWFWGGVPTEEEPLPIVYYRIKPHAAAAAA

SEQ ID NO: 326 - protein, 28 aa, Artificial Sequence
  Cyclic GFR-binding peptide
GTPGPGVPTGQEPLPIVYYRIKPHGGGG

SEQ ID NO: 327 - protein, 31 aa, Artificial Sequence
  Cyclic GFR-binding peptide
WWFWGGGSRVHHEPLPIVYYEYVRKGGGGGG

SEQ ID NO: 328 - protein, 29 aa, Artificial Sequence
  Cyclic GFR-binding peptide
GTPGPGGTQVQLEPLPIVYYEIVRKAAAA

SEQ ID NO: 329 - protein, 30 aa, Artificial Sequence
  Cyclic GFR-binding peptide
WWFWGGGGVSQELEPLTILYYDENEKGGGG

SEQ ID NO: 330 - protein, 32 aa, Artificial Sequence
  Cyclic GFR-binding peptide
GTPGPGGGVSQKMEPLTILYYDENKNGGGGGG

SEQ ID NO: 331 - protein, 27 aa, Artificial Sequence
  Cyclic GFR-binding peptide
WWFWGVSQKLEPLTILYYDEYDKAAAA

SEQ ID NO: 332 - protein, 29 aa, Artificial Sequence
  Cyclic GFR-binding peptide
GTPGPVSQQLEPLTILYYDDSSNAAAAAA

SEQ ID NO: 333 - protein, 28 aa, Artificial Sequence
  Cyclic GFR-binding peptide
WWFWGGVSQRLEPLTILYYDDSSNGGGG

SEQ ID NO: 334 - protein, 30 aa, Artificial Sequence
  Cyclic GFR-binding peptide
GTPGPGVSQKTEPLTILYYDDSSNGGGGGG

SEQ ID NO: 335 - protein, 29 aa, Artificial Sequence
  Cyclic GFR-binding peptide
WWFWGGGVSQALEPLTILYYDSSNNAAAA

SEQ ID NO: 336 - protein, 31 aa, Artificial Sequence
  Cyclic GFR-binding peptide
GTPGPGGVSQDLEPLTILYYDDMGVAAAAAA

SEQ ID NO: 337 - protein, 30 aa, Artificial Sequence
  Cyclic GFR-binding peptide
WWFWGGGGVPTELEPLTILYYDKGVVGGGG

SEQ ID NO: 338 - protein, 32 aa, Artificial Sequence
  Cyclic GFR-binding peptide
GTPGPGGGVPEKMEPLTILYYNDKQQGGGGGG

SEQ ID NO: 339 - protein, 27 aa, Artificial Sequence
  Cyclic GFR-binding peptide
WWFWGAPTKLEPLTILYYDAANNAAAA

SEQ ID NO: 340 - protein, 29 aa, Artificial Sequence
  Cyclic GFR-binding peptide
GTPGPAPTQLEPLTILYYDSANNAAAAAA

SEQ ID NO: 341 - protein, 28 aa, Artificial Sequence
  Cyclic GFR-binding peptide
WWFWGGVPTKLEPLTILYYDDSSNGGGG

SEQ ID NO: 342 - protein, 30 aa, Artificial Sequence
  Cyclic GFR-binding peptide
GTPGPGTPTKMEPLTILYYDNGRVGGGGGG

SEQ ID NO: 343 - protein, 29 aa, Artificial Sequence
  Cyclic GFR-binding peptide
WWFWGGGVPARLEPLTILYYVGRKPAAAA

SEQ ID NO: 344 - protein, 31 aa, Artificial Sequence
  Cyclic GFR-binding peptide
GTPGPGGVPTRLEPLTILYYIGKTPAAAAAA

SEQ ID NO: 345 - protein, 30 aa, Artificial Sequence
  Cyclic GFR-binding peptide
WWFWGGGGAPVKTEPLTILYYVGRTPGGGG

SEQ ID NO: 346 - protein, 32 aa, Artificial Sequence
  Cyclic GFR-binding peptide
GTPGPGGGVPQALEPLTILYYRIKPHGGGGGG

SEQ ID NO: 347 - protein, 27 aa, Artificial Sequence
  Cyclic GFR-binding peptide
WWFWGVPTEEEPLTILYYRIKPHAAAA

SEQ ID NO: 348 - protein, 29 aa, Artificial Sequence
  Cyclic GFR-binding peptide
GTPGPVPTGQEPLTILYYRIKPHAAAAAA

SEQ ID NO: 349 - protein, 28 aa, Artificial Sequence
  Cyclic GFR-binding peptide
WWFWGGSRVHHEPLTILYYRIKPHGGGG

SEQ ID NO: 350 - protein, 30 aa, Artificial Sequence
  Cyclic GFR-binding peptide
GTPGPGTQVQLEPLTILYYEYVRKGGGGGG

SEQ ID NO: 351 - protein, 29 aa, Artificial Sequence
  Cyclic GFR-binding peptide
WWFWGGGVPQELEPLTILYYEIVRKAAAA

SEQ ID NO: 352 - protein, 29 aa, Artificial Sequence
  Cyclic GFR-binding peptide
GTPGPGGVPQKMEPLTILYYDENEKGGGG

SEQ ID NO: 353 - protein, 32 aa, Artificial Sequence
  Cyclic GFR-binding peptide
WWFWGGGGVPQKLEPLTILYYDENKNGGGGGG

SEQ ID NO: 354 - protein, 30 aa, Artificial Sequence
  Cyclic GFR-binding peptide
GTPGPGGGVPQQLEPLTILYYDEYDKAAAA

SEQ ID NO: 355 - protein, 29 aa, Artificial Sequence
  Cyclic GFR-binding peptide
WWFWGVPQRLEPLTILYYDDSSNAAAAAA

SEQ ID NO: 356 - protein, 27 aa, Artificial Sequence
  Cyclic GFR-binding peptide
GTPGPVPQKTEPLTILYYDDSSNGGGG

SEQ ID NO: 357 - protein, 30 aa, Artificial Sequence
  Cyclic GFR-binding peptide
WWFWGGVPQDLEPLTILYYDDSSNGGGGGG

SEQ ID NO: 358 - protein, 28 aa, Artificial Sequence
  Cyclic GFR-binding peptide
GTPGPGVPTGQSNITMQIMDSSNNAAAA

SEQ ID NO: 359 - protein, 31 aa, Artificial Sequence
  Cyclic GFR-binding peptide
WWFWGGGVPEKMSNITMQIMDDMGVAAAAAA

SEQ ID NO: 360 - protein, 29 aa, Artificial Sequence
  Cyclic GFR-binding peptide
GTPGPGGAPTKLSNITMQIMDKGVVGGGG

SEQ ID NO: 361 - protein, 32 aa, Artificial Sequence
  Cyclic GFR-binding peptide
WWFWGGGGAPTQLSNITMQIMNDKQQGGGGGG

SEQ ID NO: 362 - protein, 30 aa, Artificial Sequence
  Cyclic GFR-binding peptide
GTPGPGGGTPTKMSNITMQIMDAANNAAAA

SEQ ID NO: 363 - protein, 29 aa, Artificial Sequence
  Cyclic GFR-binding peptide
WWFWGVPARLSNITMQIMDSANNAAAAAA

SEQ ID NO: 364 - protein, 27 aa, Artificial Sequence
  Cyclic GFR-binding peptide
GTPGPAPVKTSNITMQIMDDSSNGGGG

SEQ ID NO: 365 - protein, 30 aa, Artificial Sequence
  Cyclic GFR-binding peptide
WWFWGGVPQALSNITMQIMDNGRVGGGGGG

SEQ ID NO: 366 - protein, 28 aa, Artificial Sequence
  Cyclic GFR-binding peptide
GTPGPGVSQDLSNITMQIMVGRKPAAAA

SEQ ID NO: 367 - protein, 31 aa, Artificial Sequence
  Cyclic GFR-binding peptide
WWFWGGGVPQDLSNITMQIMIGKTPAAAAAA

SEQ ID NO: 368 - protein, 29 aa, Artificial Sequence
  Cyclic GFR-binding peptide
GTPGPGGSRVHHSNITMQIMVGRTPGGGG

SEQ ID NO: 369 - protein, 32 aa, Artificial Sequence
  Cyclic GFR-binding peptide
WWFWGGGGTQVQLSNITMQIMRIKPHGGGGGG

SEQ ID NO: 370 - protein, 30 aa, Artificial Sequence
  Cyclic GFR-binding peptide
GTPGPGGGSRVQLRSVKVAKVRIKPHAAAA

SEQ ID NO: 371 - protein, 29 aa, Artificial Sequence
  Cyclic GFR-binding peptide
WWFWGVPTELRSVKVAKVRIKPHAAAAAA

SEQ ID NO: 372 - protein, 27 aa, Artificial Sequence
  Cyclic GFR-binding peptide
GTPGPVPEKMRSVKVAKVRIKPHGGGG

SEQ ID NO: 373 - protein, 30 aa, Artificial Sequence
  Cyclic GFR-binding peptide
WWFWGGAPTKLRSVKVAKVEYVRKGGGGGG

SEQ ID NO: 374 - protein, 28 aa, Artificial Sequence
  Cyclic GFR-binding peptide
GTPGPGAPTQLRSVKVAKVEIVRKAAAA

SEQ ID NO: 375 - protein, 29 aa, Artificial Sequence
  Cyclic GFR-binding peptide
WWFWGGGVPTKLRSVKVAKVDENEKGGGG

SEQ ID NO: 376 - protein, 31 aa, Artificial Sequence
  Cyclic GFR-binding peptide
GTPGPGGTPTKMRSVKVAKVDENKNGGGGGG

SEQ ID NO: 377 - protein, 30 aa, Artificial Sequence
  Cyclic GFR-binding peptide
WWFWGGGGVPARLRSVKVAKVDEYDKAAAA

SEQ ID NO: 378 - protein, 32 aa, Artificial Sequence
  Cyclic GFR-binding peptide
GTPGPGGGVPTRLRSVKVAKVDDSSNAAAAAA

SEQ ID NO: 379 - protein, 27 aa, Artificial Sequence
  Cyclic GFR-binding peptide
WWFWGAPVKTRSVKVAKVDDSSNGGGG

SEQ ID NO: 380 - protein, 29 aa, Artificial Sequence
  Cyclic GFR-binding peptide
GTPGPVPQALRSVKVAKVDDSSNGGGGGG

SEQ ID NO: 381 - protein, 28 aa, Artificial Sequence
  Cyclic GFR-binding peptide
WWFWGGVSQDLRSVKVAKVDSSNNAAAA

SEQ ID NO: 382 - protein, 30 aa, Artificial Sequence
  Cyclic GFR-binding peptide
GTPGPGVPQDLRSVKVAKVDDMGVAAAAAA

SEQ ID NO: 383 - protein, 29 aa, Artificial Sequence
  Cyclic GFR-binding peptide
WWFWGGGVPTEERSVKVAKVDKGVVGGGG

SEQ ID NO: 384 - protein, 31 aa, Artificial Sequence
  Cyclic GFR-binding peptide
GTPGPGGVPTGQRSVKVAKVNDKQQGGGGGG

SEQ ID NO: 385 - protein, 30 aa, Artificial Sequence
  Cyclic GFR-binding peptide
WWFWGGGGTQVQLRSVKVAKVDAANNAAAA

SEQ ID NO: 386 - protein, 32 aa, Artificial Sequence
  Cyclic GFR-binding peptide
GTPGPGGGTQVHHRPVQVRKIDSANNAAAAAA

SEQ ID NO: 387 - protein, 27 aa, Artificial Sequence
  Cyclic GFR-binding peptide
WWFWGVPTELRPVQVRKIDDSSNGGGG

SEQ ID NO: 388 - protein, 29 aa, Artificial Sequence
  Cyclic GFR-binding peptide
GTPGPVPEKMRPVQVRKIDNGRVGGGGGG

SEQ ID NO: 389 - protein, 28 aa, Artificial Sequence
  Cyclic GFR-binding peptide
WWFWGGAPTKLRPVQVRKIVGRKPAAAA

SEQ ID NO: 390 - protein, 30 aa, Artificial Sequence
  Cyclic GFR-binding peptide
GTPGPGAPTQLRPVQVRKIIGKTPAAAAAA

SEQ ID NO: 391 - protein, 29 aa, Artificial Sequence
  Cyclic GFR-binding peptide
WWFWGGGVPTKLRPVQVRKIVGRTPGGGG

SEQ ID NO: 392 - protein, 31 aa, Artificial Sequence
  Cyclic GFR-binding peptide
GTPGPGGTPTKMRPVQVRKIRIKPHGGGGGG

SEQ ID NO: 393 - protein, 30 aa, Artificial Sequence
  Cyclic GFR-binding peptide
WWFWGGGGVPARLRPVQVRKIRIKPHAAAA

SEQ ID NO: 394 - protein, 32 aa, Artificial Sequence
  Cyclic GFR-binding peptide
GTPGPGGGVPTRLRPVQVRKIRIKPHAAAAAA

SEQ ID NO: 395 - protein, 27 aa, Artificial Sequence
  Cyclic GFR-binding peptide
WWFWGAPVKTRPVQVRKIRIKPHGGGG

SEQ ID NO: 396 - protein, 29 aa, Artificial Sequence
  Cyclic GFR-binding peptide
GTPGPVPQALRPVQVRKIEYVRKGGGGGG

SEQ ID NO: 397 - protein, 28 aa, Artificial Sequence
  Cyclic GFR-binding peptide
WWFWGGVSQDLRPVQVRKIEIVRKAAAA

SEQ ID NO: 398 - protein, 28 aa, Artificial Sequence
  Cyclic GFR-binding peptide
GTPGPGVPQDLRPVQVRKIDENEKGGGG

SEQ ID NO: 399 - protein, 31 aa, Artificial Sequence
  Cyclic GFR-binding peptide
WWFWGGGVPTEERPVQVRKIDENKNGGGGGG

SEQ ID NO: 400 - protein, 29 aa, Artificial Sequence
  Cyclic GFR-binding peptide
GTPGPGGVPTGQRPVQVRKIDEYDKAAAA

SEQ ID NO: 401 - protein, 32 aa, Artificial Sequence
  Cyclic GFR-binding peptide
WWFWGGGGSRVHHRPVQVRKIDDSSNAAAAAA

SEQ ID NO: 402 - protein, 27 aa, Artificial Sequence
  Cyclic GFR-binding peptide
GTPGPGGGSAISILYLDENEKVVGGGG

SEQ ID NO: 403 - protein, 26 aa, Artificial Sequence
  Cyclic GFR-binding peptide
WWFWGSAISVLYLDENKNVVGGGGGG

SEQ ID NO: 404 - protein, 24 aa, Artificial Sequence
  Cyclic GFR-binding peptide
GTPGPSSLSMLFFDEYDKVVAAAA

SEQ ID NO: 405 - protein, 27 aa, Artificial Sequence
  Cyclic GFR-binding peptide
WWFWGGSSLSVLFFDDSSNVIAAAAAA

SEQ ID NO: 406 - protein, 25 aa, Artificial Sequence
  Cyclic GFR-binding peptide
GTPGPGNAISMLYFDDSSNVIGGGG

SEQ ID NO: 407 - protein, 28 aa, Artificial Sequence
  Cyclic GFR-binding peptide
WWFWGGGNAISILYFDDSSNVIGGGGGG

SEQ ID NO: 408 - protein, 26 aa, Artificial Sequence
  Cyclic GFR-binding peptide
GTPGPGGSATSMLYYDSSNNVIAAAA

SEQ ID NO: 409 - protein, 29 aa, Artificial Sequence
  Cyclic GFR-binding peptide
WWFWGGGGSATSILYYDDMGVPTAAAAAA

SEQ ID NO: 410 - protein, 27 aa, Artificial Sequence
  Cyclic GFR-binding peptide
GTPGPGGGSPISMLYKDKGVVTYGGGG

SEQ ID NO: 411 - protein, 26 aa, Artificial Sequence
  Cyclic GFR-binding peptide
WWFWGSPISILYKNDKQQIIGGGGGG

SEQ ID NO: 412 - protein, 24 aa, Artificial Sequence
  Cyclic GFR-binding peptide
GTPGPEPISMLYLDAANNVVAAAA

SEQ ID NO: 413 - protein, 27 aa, Artificial Sequence
  Cyclic GFR-binding peptide
WWFWGGEPISVLYLDSANNVVAAAAAA

SEQ ID NO: 414 - protein, 25 aa, Artificial Sequence
  Cyclic GFR-binding peptide
GTPGPGSPINILYFDDSSNVIGGGG

SEQ ID NO: 415 - protein, 28 aa, Artificial Sequence
  Cyclic GFR-binding peptide
WWFWGGGSPINVLYFDNGRVLLGGGGGG

SEQ ID NO: 416 - protein, 26 aa, Artificial Sequence
  Cyclic GFR-binding peptide
GTPGPGGSPISMLYIVGRKPKVAAAA

SEQ ID NO: 417 - protein, 29 aa, Artificial Sequence
  Cyclic GFR-binding peptide
WWFWGGGGSPISVLYIIGKTPKIAAAAAA

SEQ ID NO: 418 - protein, 27 aa, Artificial Sequence
  Cyclic GFR-binding peptide
GTPGPGGGSPISMLFIVGRTPKVGGGG

SEQ ID NO: 419 - protein, 28 aa, Artificial Sequence
  Cyclic GFR-binding peptide
WWFWGSPISVLFIRIKPHQGQHGGGGGG

SEQ ID NO: 420 - protein, 26 aa, Artificial Sequence
  Cyclic GFR-binding peptide
GTPGPKPLSILYVRIKPHQGQHAAAA

SEQ ID NO: 421 - protein, 29 aa, Artificial Sequence
  Cyclic GFR-binding peptide
WWFWGGKPLSVLYVRIKPHQGQHAAAAAA

SEQ ID NO: 422 - protein, 27 aa, Artificial Sequence
  Cyclic GFR-binding peptide
GTPGPGEPLPMVYYRIKPHQGQHGGGG

SEQ ID NO: 423 - protein, 30 aa, Artificial Sequence
  Cyclic GFR-binding peptide
WWFWGGGEPLPVVYYEYVRKKPKLGGGGGG

SEQ ID NO: 424 - protein, 28 aa, Artificial Sequence
  Cyclic GFR-binding peptide
GTPGPGGEPLTMLYYEIVRKKPIFAAAA

SEQ ID NO: 425 - protein, 29 aa, Artificial Sequence
  Cyclic GFR-binding peptide
WWFWGGGGEPLTVLYYDENEKVVAAAAAA

SEQ ID NO: 426 - protein, 27 aa, Artificial Sequence
  Cyclic GFR-binding peptide
GTPGPGGGSNITIQIMDENKNVVGGGG

SEQ ID NO: 427 - protein, 26 aa, Artificial Sequence
  Cyclic GFR-binding peptide
WWFWGSNITVQIMDEYDKVVGGGGGG

SEQ ID NO: 428 - protein, 24 aa, Artificial Sequence
  Cyclic GFR-binding peptide
GTPGPRSVKMAKVDDSSNVIAAAA

SEQ ID NO: 429 - protein, 27 aa, Artificial Sequence
  Cyclic GFR-binding peptide
WWFWGGRSVKIAKVDDSSNVIAAAAAA

SEQ ID NO: 430 - protein, 25 aa, Artificial Sequence
  Cyclic GFR-binding peptide
GTPGPGRPVQMRKIDDSSNVIGGGG

SEQ ID NO: 431 - protein, 28 aa, Artificial Sequence
  Cyclic GFR-binding peptide
WWFWGGGRPVQIRKIDSSNNVIGGGGGG

SEQ ID NO: 432 - protein, 26 aa, Artificial Sequence
  Cyclic GFR-binding peptide
GTPGPGGSAISMLYLDDMGVPTAAAA

SEQ ID NO: 433 - protein, 29 aa, Artificial Sequence
  Cyclic GFR-binding peptide
WWFWGGGGSSLSILFFDKGVVTYAAAAAA

SEQ ID NO: 434 - protein, 27 aa, Artificial Sequence
  Cyclic GFR-binding peptide
GTPGPGGGNAISVLYFNDKQQIIGGGG

SEQ ID NO: 435 - protein, 26 aa, Artificial Sequence
  Cyclic GFR-binding peptide
WWFWGSATSVLYYDAANNVVGGGGGG

SEQ ID NO: 436 - protein, 24 aa, Artificial Sequence
  Cyclic GFR-binding peptide
GTPGPSPISVLYKDSANNVVAAAA

SEQ ID NO: 437 - protein, 27 aa, Artificial Sequence
  Cyclic GFR-binding peptide
WWFWGGEPISILYLDDSSNVIAAAAAA

SEQ ID NO: 438 - protein, 25 aa, Artificial Sequence
  Cyclic GFR-binding peptide
GTPGPGSPINMLYFDNGRVLLGGGG

SEQ ID NO: 439 - protein, 28 aa, Artificial Sequence
  Cyclic GFR-binding peptide
WWFWGGGSPISILYIVGRKPKVGGGGGG

SEQ ID NO: 440 - protein, 26 aa, Artificial Sequence
  Cyclic GFR-binding peptide
GTPGPGGSPISILFIIGKTPKIAAAA

SEQ ID NO: 441 - protein, 29 aa, Artificial Sequence
  Cyclic GFR-binding peptide
WWFWGGGGKPLSMLYVVGRTPKVAAAAAA

SEQ ID NO: 442 - protein, 29 aa, Artificial Sequence
  Cyclic GFR-binding peptide
GTPGPGGGEPLPIVYYRIKPHQGQHGGGG

SEQ ID NO: 443 - protein, 28 aa, Artificial Sequence
  Cyclic GFR-binding peptide
WWFWGEPLTILYYRIKPHQGQHGGGGGG

SEQ ID NO: 444 - protein, 26 aa, Artificial Sequence
  Cyclic GFR-binding peptide
GTPGPSNITMQIMRIKPHQGQHAAAA

SEQ ID NO: 445 - protein, 29 aa, Artificial Sequence
  Cyclic GFR-binding peptide
WWFWGGRSVKVAKVRIKPHQGQHAAAAAA

SEQ ID NO: 446 - protein, 27 aa, Artificial Sequence
  Cyclic GFR-binding peptide
GTPGPGRPVQVRKIEYVRKKPKLGGGG

SEQ ID NO: 447 - protein, 20 aa, Artificial Sequence
  Cyclic GFR-binding peptide
GTPGPGGGSAISILYLGGGG

SEQ ID NO: 448 - protein, 19 aa, Artificial Sequence
  Cyclic GFR-binding peptide
WWFWGSAISVLYLGGGGGG

SEQ ID NO: 449 - protein, 17 aa, Artificial Sequence
  Cyclic GFR-binding peptide
GTPGPSSLSMLFFAAAA

SEQ ID NO: 450 - protein, 20 aa, Artificial Sequence
  Cyclic GFR-binding peptide
WWFWGGSSLSVLFFAAAAAA

SEQ ID NO: 451 - protein, 18 aa, Artificial Sequence
  Cyclic GFR-binding peptide
GTPGPGNAISMLYFGGGG

SEQ ID NO: 452 - protein, 21 aa, Artificial Sequence
  Cyclic GFR-binding peptide
WWFWGGGNAISILYFGGGGGG

SEQ ID NO: 453 - protein, 19 aa, Artificial Sequence
  Cyclic GFR-binding peptide
GTPGPGGSATSMLYYAAAA

SEQ ID NO: 454 - protein, 22 aa, Artificial Sequence
  Cyclic GFR-binding peptide
WWFWGGGGSATSILYYAAAAAA

SEQ ID NO: 455 - protein, 20 aa, Artificial Sequence
  Cyclic GFR-binding peptide
GTPGPGGGSPISMLYKGGGG

SEQ ID NO: 456 - protein, 19 aa, Artificial Sequence
  Cyclic GFR-binding peptide
WWFWGSPISILYKGGGGGG

SEQ ID NO: 457 - protein, 17 aa, Artificial Sequence
  Cyclic GFR-binding peptide
GTPGPEPISMLYLAAAA

SEQ ID NO: 458 - protein, 20 aa, Artificial Sequence
  Cyclic GFR-binding peptide
WWFWGGEPISVLYLAAAAAA

SEQ ID NO: 459 - protein, 18 aa, Artificial Sequence
  Cyclic GFR-binding peptide
GTPGPGSPINILYFGGGG

SEQ ID NO: 460 - protein, 21 aa, Artificial Sequence
  Cyclic GFR-binding peptide
WWFWGGGSPINVLYFGGGGGG

SEQ ID NO: 461 - protein, 19 aa, Artificial Sequence
  Cyclic GFR-binding peptide
GTPGPGGSPISMLYIAAAA

SEQ ID NO: 462 - protein, 22 aa, Artificial Sequence
  Cyclic GFR-binding peptide
WWFWGGGGSPISVLYIAAAAAA

SEQ ID NO: 463 - protein, 20 aa, Artificial Sequence
  Cyclic GFR-binding peptide
GTPGPGGGSPISMLFIGGGG

SEQ ID NO: 464 - protein, 19 aa, Artificial Sequence
  Cyclic GFR-binding peptide
WWFWGSPISVLFIGGGGGG

SEQ ID NO: 465 - protein, 17 aa, Artificial Sequence
  Cyclic GFR-binding peptide
GTPGPKPLSILYVAAAA

SEQ ID NO: 466 - protein, 20 aa, Artificial Sequence
  Cyclic GFR-binding peptide
WWFWGGKPLSVLYVAAAAAA

SEQ ID NO: 467 - protein, 18 aa, Artificial Sequence
  Cyclic GFR-binding peptide
GTPGPGEPLPMVYYGGGG

SEQ ID NO: 468 - protein, 21 aa, Artificial Sequence
  Cyclic GFR-binding peptide
WWFWGGGEPLPVVYYGGGGGG

SEQ ID NO: 469 - protein, 19 aa, Artificial Sequence
  Cyclic GFR-binding peptide
GTPGPGGEPLTMLYYAAAA

SEQ ID NO: 470 - protein, 22 aa, Artificial Sequence
  Cyclic GFR-binding peptide
WWFWGGGGEPLTVLYYAAAAAA

SEQ ID NO: 471 - protein, 20 aa, Artificial Sequence
  Cyclic GFR-binding peptide
GTPGPGGGSNITIQIMGGGG

SEQ ID NO: 472 - protein, 19 aa, Artificial Sequence
  Cyclic GFR-binding peptide
WWFWGSNITVQIMGGGGGG

SEQ ID NO: 473 - protein, 17 aa, Artificial Sequence
  Cyclic GFR-binding peptide
GTPGPRSVKMAKVAAAA

SEQ ID NO: 474 - protein, 20 aa, Artificial Sequence
  Cyclic GFR-binding peptide
WWFWGGRSVKIAKVAAAAAA

SEQ ID NO: 475 - protein, 18 aa, Artificial Sequence
  Cyclic GFR-binding peptide
GTPGPGRPVQMRKIGGGG

SEQ ID NO: 476 - protein, 21 aa, Artificial Sequence
  Cyclic GFR-binding peptide
WWFWGGGRPVQIRKIGGGGGG

SEQ ID NO: 477 - protein, 19 aa, Artificial Sequence
  Cyclic GFR-binding peptide
GTPGPGGSAISMLYLAAAA

SEQ ID NO: 478 - protein, 22 aa, Artificial Sequence
  Cyclic GFR-binding peptide
WWFWGGGGSSLSILFFAAAAAA

SEQ ID NO: 479 - protein, 20 aa, Artificial Sequence
  Cyclic GFR-binding peptide
GTPGPGGGNAISVLYFGGGG

SEQ ID NO: 480 - protein, 19 aa, Artificial Sequence
  Cyclic GFR-binding peptide
WWFWGSATSVLYYGGGGGG

SEQ ID NO: 481 - protein, 17 aa, Artificial Sequence
  Cyclic GFR-binding peptide
GTPGPSPISVLYKAAAA

SEQ ID NO: 482 - protein, 20 aa, Artificial Sequence
  Cyclic GFR-binding peptide
WWFWGGEPISILYLAAAAAA

SEQ ID NO: 483 - protein, 18 aa, Artificial Sequence
  Cyclic GFR-binding peptide
GTPGPGSPINMLYFGGGG

SEQ ID NO: 484 - protein, 21 aa, Artificial Sequence
  Cyclic GFR-binding peptide
WWFWGGGSPISILYIGGGGGG

SEQ ID NO: 485 - protein, 19 aa, Artificial Sequence
  Cyclic GFR-binding peptide
GTPGPGGSPISILFIAAAA

SEQ ID NO: 486 - protein, 22 aa, Artificial Sequence
  Cyclic GFR-binding peptide
WWFWGGGGKPLSMLYVAAAAAA

SEQ ID NO: 487 - protein, 20 aa, Artificial Sequence
  Cyclic GFR-binding peptide
GTPGPGGGEPLPIVYYGGGG

SEQ ID NO: 488 - protein, 19 aa, Artificial Sequence
  Cyclic GFR-binding peptide
WWFWGEPLTILYYGGGGGG

SEQ ID NO: 489 - protein, 17 aa, Artificial Sequence
  Cyclic GFR-binding peptide
GTPGPSNITMQIMAAAA

SEQ ID NO: 490 - protein, 20 aa, Artificial Sequence
  Cyclic GFR-binding peptide
WWFWGGRSVKVAKVAAAAAA

SEQ ID NO: 491 - protein, 18 aa, Artificial Sequence
  Cyclic GFR-binding peptide
GTPGPGRPVQVRKIGGGG

SEQ ID NO: 492 - protein, 15 aa, Artificial Sequence
  Cyclic GFR-binding peptide
SAISILYLGGGGGGG

SEQ ID NO: 493 - protein, 16 aa, Artificial Sequence
  Cyclic GFR-binding peptide
SAISVLYLGGGGGGGG

SEQ ID NO: 494 - protein, 15 aa, Artificial Sequence
  Cyclic GFR-binding peptide
SSLSMLFFAAAAAAA

SEQ ID NO: 495 - protein, 16 aa, Artificial Sequence
  Cyclic GFR-binding peptide
SSLSVLFFAAAAAAAA

SEQ ID NO: 496 - protein, 15 aa, Artificial Sequence
  Cyclic GFR-binding peptide
NAISMLYFGGGGGGG

SEQ ID NO: 497 - protein, 16 aa, Artificial Sequence
  Cyclic GFR-binding peptide
NAISILYFGGGGGGGG

SEQ ID NO: 498 - protein, 15 aa, Artificial Sequence
  Cyclic GFR-binding peptide
SATSMLYYAAAAAAA

SEQ ID NO: 499 - protein, 16 aa, Artificial Sequence
  Cyclic GFR-binding peptide
SATSILYYAAAAAAAA

SEQ ID NO: 500 - protein, 15 aa, Artificial Sequence
  Cyclic GFR-binding peptide
SPISMLYKGGGGGGG

SEQ ID NO: 501 - protein, 16 aa, Artificial Sequence
  Cyclic GFR-binding peptide
SPISILYKGGGGGGGG

SEQ ID NO: 502 - protein, 15 aa, Artificial Sequence
  Cyclic GFR-binding peptide
EPISMLYLAAAAAAA

SEQ ID NO: 503 - protein, 16 aa, Artificial Sequence
  Cyclic GFR-binding peptide
EPISVLYLAAAAAAAA

SEQ ID NO: 504 - protein, 15 aa, Artificial Sequence
  Cyclic GFR-binding peptide
SPINILYFGGGGGGG

SEQ ID NO: 505 - protein, 16 aa, Artificial Sequence
  Cyclic GFR-binding peptide
SPINVLYFGGGGGGGG

SEQ ID NO: 506 - protein, 15 aa, Artificial Sequence
  Cyclic GFR-binding peptide
SPISMLYIAAAAAAA

SEQ ID NO: 507 - protein, 16 aa, Artificial Sequence
  Cyclic GFR-binding peptide
SPISVLYIAAAAAAAA

SEQ ID NO: 508 - protein, 15 aa, Artificial Sequence
  Cyclic GFR-binding peptide
SPISMLFIGGGGGGG

SEQ ID NO: 509 - protein, 16 aa, Artificial Sequence
  Cyclic GFR-binding peptide
SPISVLFIGGGGGGGG

SEQ ID NO: 510 - protein, 15 aa, Artificial Sequence
  Cyclic GFR-binding peptide
KPLSILYVAAAAAAA

SEQ ID NO: 511 - protein, 16 aa, Artificial Sequence
  Cyclic GFR-binding peptide
KPLSVLYVAAAAAAAA

SEQ ID NO: 512 - protein, 15 aa, Artificial Sequence
  Cyclic GFR-binding peptide
EPLPMVYYGGGGGGG

SEQ ID NO: 513 - protein, 16 aa, Artificial Sequence
  Cyclic GFR-binding peptide
EPLPVVYYGGGGGGGG

SEQ ID NO: 514 - protein, 15 aa, Artificial Sequence
  Cyclic GFR-binding peptide
EPLTMLYYAAAAAAA

SEQ ID NO: 515 - protein, 16 aa, Artificial Sequence
  Cyclic GFR-binding peptide
EPLTVLYYAAAAAAAA

SEQ ID NO: 516 - protein, 15 aa, Artificial Sequence
  Cyclic GFR-binding peptide
SNITIQIMGGGGGGG

SEQ ID NO: 517 - protein, 16 aa, Artificial Sequence
  Cyclic GFR-binding peptide
SNITVQIMGGGGGGGG

SEQ ID NO: 518 - protein, 15 aa, Artificial Sequence
  Cyclic GFR-binding peptide
RSVKMAKVAAAAAAA

SEQ ID NO: 519 - protein, 16 aa, Artificial Sequence
  Cyclic GFR-binding peptide
RSVKIAKVAAAAAAAA

SEQ ID NO: 520 - protein, 15 aa, Artificial Sequence
  Cyclic GFR-binding peptide
RPVQMRKIGGGGGGG

SEQ ID NO: 521 - protein, 16 aa, Artificial Sequence
  Cyclic GFR-binding peptide
RPVQIRKIGGGGGGGG

SEQ ID NO: 522 - protein, 15 aa, Artificial Sequence
  Cyclic GFR-binding peptide
SAISMLYLAAAAAAA

SEQ ID NO: 523 - protein, 16 aa, Artificial Sequence
  Cyclic GFR-binding peptide
SSLSILFFAAAAAAAA

SEQ ID NO: 524 - protein, 15 aa, Artificial Sequence
  Cyclic GFR-binding peptide
NAISVLYFGGGGGGG

SEQ ID NO: 525 - protein, 16 aa, Artificial Sequence
  Cyclic GFR-binding peptide
SATSVLYYGGGGGGGG

SEQ ID NO: 526 - protein, 15 aa, Artificial Sequence
  Cyclic GFR-binding peptide
SPISVLYKAAAAAAA

SEQ ID NO: 527 - protein, 16 aa, Artificial Sequence
  Cyclic GFR-binding peptide
EPISILYLAAAAAAAA

SEQ ID NO: 528 - protein, 15 aa, Artificial Sequence
  Cyclic GFR-binding peptide
SPINMLYFGGGGGGG

SEQ ID NO: 529 - protein, 16 aa, Artificial Sequence
  Cyclic GFR-binding peptide
SPISILYIGGGGGGGG

SEQ ID NO: 530 - protein, 15 aa, Artificial Sequence
  Cyclic GFR-binding peptide
SPISILFIAAAAAAA

SEQ ID NO: 531 - protein, 16 aa, Artificial Sequence
  Cyclic GFR-binding peptide
KPLSMLYVAAAAAAAA

SEQ ID NO: 532 - protein, 15 aa, Artificial Sequence
  Cyclic GFR-binding peptide
EPLPIVYYGGGGGGG

SEQ ID NO: 533 - protein, 16 aa, Artificial Sequence
  Cyclic GFR-binding peptide
EPLTILYYGGGGGGGG

SEQ ID NO: 534 - protein, 15 aa, Artificial Sequence
  Cyclic GFR-binding peptide
SNITMQIMAAAAAAA

SEQ ID NO: 535 - protein, 16 aa, Artificial Sequence
  Cyclic GFR-binding peptide
RSVKVAKVAAAAAAAA

SEQ ID NO: 536 - protein, 15 aa, Artificial Sequence
  Cyclic GFR-binding peptide
RPVQVRKIGGGGGGG

SEQ ID NO: 537 - protein, 27 aa, Artificial Sequence
  Cyclic GFR-binding peptide
RIKPHVPTKMSAISMLYLDENEKGGGG

SEQ ID NO: 538 - protein, 29 aa, Artificial Sequence
  Cyclic GFR-binding peptide
EYVRKVPTKLSAISMLYLDENKNGGGGGG

SEQ ID NO: 539 - protein, 27 aa, Artificial Sequence
  Cyclic GFR-binding peptide
EIVRKVPTQLSAISMLYLDEYDKAAAA

SEQ ID NO: 540 - protein, 29 aa, Artificial Sequence
  Cyclic GFR-binding peptide
DENEKVPTRLSAISMLYLDDSSNAAAAAA

SEQ ID NO: 541 - protein, 27 aa, Artificial Sequence
  Cyclic GFR-binding peptide
DENKNVPTKTSAISMLYLDDSSNGGGG

SEQ ID NO: 542 - protein, 29 aa, Artificial Sequence
  Cyclic GFR-binding peptide
DEYDKVPTALSAISMLYLDDSSNGGGGGG

SEQ ID NO: 543 - protein, 27 aa, Artificial Sequence
  Cyclic GFR-binding peptide
DDSSNVPTDLSAISMLYLDSSNNAAAA

SEQ ID NO: 544 - protein, 29 aa, Artificial Sequence
  Cyclic GFR-binding peptide
DDSSNVPEKMSAISMLYLDDMGVAAAAAA

SEQ ID NO: 545 - protein, 27 aa, Artificial Sequence
  Cyclic GFR-binding peptide
DDSSNAPTKLSAISMLYLDKGVVGGGG

SEQ ID NO: 546 - protein, 29 aa, Artificial Sequence
  Cyclic GFR-binding peptide
DSSNNAPTQLSAISMLYLNDKQQGGGGGG

SEQ ID NO: 547 - protein, 27 aa, Artificial Sequence
  Cyclic GFR-binding peptide
DDMGVTPTKMSAISMLYLDAANNAAAA

SEQ ID NO: 548 - protein, 29 aa, Artificial Sequence
  Cyclic GFR-binding peptide
DKGVVVPARLSAISMLYLDSANNAAAAAA

SEQ ID NO: 549 - protein, 27 aa, Artificial Sequence
  Cyclic GFR-binding peptide
NDKQQAPVKTSAISMLYLDDSSNGGGG

SEQ ID NO: 550 - protein, 29 aa, Artificial Sequence
  Cyclic GFR-binding peptide
DAANNVPQALSAISMLYLDNGRVGGGGGG

SEQ ID NO: 551 - protein, 27 aa, Artificial Sequence
  Cyclic GFR-binding peptide
DSANNVSQDLSAISMLYLVGRKPAAAA

SEQ ID NO: 552 - protein, 29 aa, Artificial Sequence
  Cyclic GFR-binding peptide
DDSSNVPQDLSAISMLYLIGKTPAAAAAA

SEQ ID NO: 553 - protein, 27 aa, Artificial Sequence
  Cyclic GFR-binding peptide
DNGRVSRVHHSAISMLYLVGRTPGGGG

SEQ ID NO: 554 - protein, 29 aa, Artificial Sequence
  Cyclic GFR-binding peptide
VGRKPTQVQLSAISMLYLRIKPHGGGGGG

SEQ ID NO: 555 - protein, 27 aa, Artificial Sequence
  Cyclic GFR-binding peptide
IGKTPVPEELSSLSILFFRIKPHAAAA

SEQ ID NO: 556 - protein, 29 aa, Artificial Sequence
  Cyclic GFR-binding peptide
VGRTPVPEKLSSLSILFFRIKPHAAAAAA

SEQ ID NO: 557 - protein, 27 aa, Artificial Sequence
  Cyclic GFR-binding peptide
RIKPHVPEQLSSLSILFFRIKPHGGGG

SEQ ID NO: 558 - protein, 29 aa, Artificial Sequence
  Cyclic GFR-binding peptide
RIKPHVPEKMSSLSILFFEYVRKGGGGGG

SEQ ID NO: 559 - protein, 27 aa, Artificial Sequence
  Cyclic GFR-binding peptide
RIKPHVPERLSSLSILFFEIVRKAAAA

SEQ ID NO: 560 - protein, 27 aa, Artificial Sequence
  Cyclic GFR-binding peptide
DENEKVPEKTSSLSILFFDENEKGGGG

SEQ ID NO: 561 - protein, 29 aa, Artificial Sequence
  Cyclic GFR-binding peptide
DENKNVPEALSSLSILFFDENKNGGGGGG

SEQ ID NO: 562 - protein, 27 aa, Artificial Sequence
  Cyclic GFR-binding peptide
DEYDKVPEDLSSLSILFFDEYDKAAAA

SEQ ID NO: 563 - protein, 29 aa, Artificial Sequence
  Cyclic GFR-binding peptide
DDSSNVPTELSSLSILFFDDSSNAAAAAA

SEQ ID NO: 564 - protein, 27 aa, Artificial Sequence
  Cyclic GFR-binding peptide
DDSSNAPTKLSSLSILFFDDSSNGGGG

SEQ ID NO: 565 - protein, 29 aa, Artificial Sequence
  Cyclic GFR-binding peptide
DDSSNAPTQLSSLSILFFDDSSNGGGGGG

SEQ ID NO: 566 - protein, 27 aa, Artificial Sequence
  Cyclic GFR-binding peptide
DSSNNVPTKLSSLSILFFDSSNNAAAA

SEQ ID NO: 567 - protein, 29 aa, Artificial Sequence
  Cyclic GFR-binding peptide
DDMGVTPTKMSSLSILFFDDMGVAAAAAA

SEQ ID NO: 568 - protein, 27 aa, Artificial Sequence
  Cyclic GFR-binding peptide
DKGVVVPARLSSLSILFFDKGVVGGGG

SEQ ID NO: 569 - protein, 29 aa, Artificial Sequence
  Cyclic GFR-binding peptide
NDKQQVPTRLSSLSILFFNDKQQGGGGGG

SEQ ID NO: 570 - protein, 27 aa, Artificial Sequence
  Cyclic GFR-binding peptide
DAANNAPVKTSSLSILFFDAANNAAAA

SEQ ID NO: 571 - protein, 29 aa, Artificial Sequence
  Cyclic GFR-binding peptide
DSANNVPQALSSLSILFFDSANNAAAAAA

SEQ ID NO: 572 - protein, 27 aa, Artificial Sequence
  Cyclic GFR-binding peptide
DDSSNVSQDLSSLSILFFDDSSNGGGG

SEQ ID NO: 573 - protein, 29 aa, Artificial Sequence
  Cyclic GFR-binding peptide
DNGRVVPQDLSSLSILFFDNGRVGGGGGG

SEQ ID NO: 574 - protein, 27 aa, Artificial Sequence
  Cyclic GFR-binding peptide
VGRKPVPTEESSLSILFFVGRKPAAAA

SEQ ID NO: 575 - protein, 29 aa, Artificial Sequence
  Cyclic GFR-binding peptide
IGKTPVPTGQSSLSILFFIGKTPAAAAAA

SEQ ID NO: 576 - protein, 27 aa, Artificial Sequence
  Cyclic GFR-binding peptide
VGRTPSRVHHSSLSILFFVGRTPGGGG

SEQ ID NO: 577 - protein, 29 aa, Artificial Sequence
  Cyclic GFR-binding peptide
RIKPHTQVQLSSLSILFFRIKPHGGGGGG

SEQ ID NO: 578 - protein, 27 aa, Artificial Sequence
  Cyclic GFR-binding peptide
RIKPHAPTELNAISVLYFRIKPHAAAA

SEQ ID NO: 579 - protein, 29 aa, Artificial Sequence
  Cyclic GFR-binding peptide
RIKPHAPTKMNAISVLYFRIKPHAAAAAA

SEQ ID NO: 580 - protein, 27 aa, Artificial Sequence
  Cyclic GFR-binding peptide
RIKPHAPTKLNAISVLYFRIKPHGGGG

SEQ ID NO: 581 - protein, 29 aa, Artificial Sequence
  Cyclic GFR-binding peptide
EYVRKAPTRLNAISVLYFEYVRKGGGGGG

SEQ ID NO: 582 - protein, 27 aa, Artificial Sequence
  Cyclic GFR-binding peptide
EIVRKAPTKTNAISVLYFEIVRKAAAA

SEQ ID NO: 583 - protein, 27 aa, Artificial Sequence
  Cyclic GFR-binding peptide
DENEKAPTALNAISVLYFDENEKGGGG

SEQ ID NO: 584 - protein, 29 aa, Artificial Sequence
  Cyclic GFR-binding peptide
DENKNAPTDLNAISVLYFDENKNGGGGGG

SEQ ID NO: 585 - protein, 27 aa, Artificial Sequence
  Cyclic GFR-binding peptide
DEYDKVPTELNAISVLYFDEYDKAAAA

SEQ ID NO: 586 - protein, 29 aa, Artificial Sequence
  Cyclic GFR-binding peptide
DDSSNVPEKMNAISVLYFDDSSNAAAAAA

SEQ ID NO: 587 - protein, 27 aa, Artificial Sequence
  Cyclic GFR-binding peptide
DDSSNVPTKLNAISVLYFDDSSNGGGG

SEQ ID NO: 588 - protein, 29 aa, Artificial Sequence
  Cyclic GFR-binding peptide
DDSSNTPTKMNAISVLYFDDSSNGGGGGG

SEQ ID NO: 589 - protein, 27 aa, Artificial Sequence
  Cyclic GFR-binding peptide
DSSNNVPARLNAISVLYFDSSNNAAAA

SEQ ID NO: 590 - protein, 29 aa, Artificial Sequence
  Cyclic GFR-binding peptide
DDMGVVPTRLNAISVLYFDDMGVAAAAAA

SEQ ID NO: 591 - protein, 27 aa, Artificial Sequence
  Cyclic GFR-binding peptide
DKGVVAPVKTNAISVLYFDKGVVGGGG

SEQ ID NO: 592 - protein, 29 aa, Artificial Sequence
  Cyclic GFR-binding peptide
NDKQQVPQALNAISVLYFNDKQQGGGGGG

SEQ ID NO: 593 - protein, 27 aa, Artificial Sequence
  Cyclic GFR-binding peptide
DAANNVSQDLNAISVLYFDAANNAAAA

SEQ ID NO: 594 - protein, 29 aa, Artificial Sequence
  Cyclic GFR-binding peptide
DSANNVPQDLNAISVLYFDSANNAAAAAA

SEQ ID NO: 595 - protein, 27 aa, Artificial Sequence
  Cyclic GFR-binding peptide
DDSSNVPTEENAISVLYFDDSSNGGGG

SEQ ID NO: 596 - protein, 29 aa, Artificial Sequence
  Cyclic GFR-binding peptide
DNGRVVPTGQNAISVLYFDNGRVGGGGGG

SEQ ID NO: 597 - protein, 27 aa, Artificial Sequence
  Cyclic GFR-binding peptide
VGRKPSRVHHNAISVLYFVGRKPAAAA

SEQ ID NO: 598 - protein, 29 aa, Artificial Sequence
  Cyclic GFR-binding peptide
IGKTPTQVQLNAISVLYFIGKTPAAAAAA

SEQ ID NO: 599 - protein, 27 aa, Artificial Sequence
  Cyclic GFR-binding peptide
VGRTPAPTELSATSVLYYVGRTPGGGG

SEQ ID NO: 600 - protein, 29 aa, Artificial Sequence
  Cyclic GFR-binding peptide
RIKPHAPTKMSATSVLYYRIKPHGGGGGG

SEQ ID NO: 601 - protein, 27 aa, Artificial Sequence
  Cyclic GFR-binding peptide
RIKPHAPTKLSATSVLYYRIKPHAAAA

SEQ ID NO: 602 - protein, 29 aa, Artificial Sequence
  Cyclic GFR-binding peptide
RIKPHAPTQLSATSVLYYRIKPHAAAAAA

SEQ ID NO: 603 - protein, 27 aa, Artificial Sequence
  Cyclic GFR-binding peptide
RIKPHAPTRLSATSVLYYRIKPHGGGG

SEQ ID NO: 604 - protein, 29 aa, Artificial Sequence
  Cyclic GFR-binding peptide
EYVRKAPTKTSATSVLYYEYVRKGGGGGG

SEQ ID NO: 605 - protein, 27 aa, Artificial Sequence
  Cyclic GFR-binding peptide
EIVRKAPTALSATSVLYYEIVRKAAAA

SEQ ID NO: 606 - protein, 27 aa, Artificial Sequence
  Cyclic GFR-binding peptide
DENEKAPTDLSATSVLYYDENEKGGGG

SEQ ID NO: 607 - protein, 29 aa, Artificial Sequence
  Cyclic GFR-binding peptide
DENKNVPTELSATSVLYYDENKNGGGGGG

SEQ ID NO: 608 - protein, 27 aa, Artificial Sequence
  Cyclic GFR-binding peptide
DEYDKVPEKMSATSVLYYDEYDKAAAA

SEQ ID NO: 609 - protein, 29 aa, Artificial Sequence
  Cyclic GFR-binding peptide
DDSSNVPTKLSATSVLYYDDSSNAAAAAA

SEQ ID NO: 610 - protein, 27 aa, Artificial Sequence
  Cyclic GFR-binding peptide
DDSSNTPTKMSATSVLYYDDSSNGGGG

SEQ ID NO: 611 - protein, 29 aa, Artificial Sequence
  Cyclic GFR-binding peptide
DDSSNVPARLSATSVLYYDDSSNGGGGGG

SEQ ID NO: 612 - protein, 27 aa, Artificial Sequence
  Cyclic GFR-binding peptide
DSSNNVPTRLSATSVLYYDSSNNAAAA

SEQ ID NO: 613 - protein, 29 aa, Artificial Sequence
  Cyclic GFR-binding peptide
DDMGVAPVKTSATSVLYYDDMGVAAAAAA

SEQ ID NO: 614 - protein, 27 aa, Artificial Sequence
  Cyclic GFR-binding peptide
DKGVVVPQALSATSVLYYDKGVVGGGG

SEQ ID NO: 615 - protein, 29 aa, Artificial Sequence
  Cyclic GFR-binding peptide
NDKQQVSQDLSATSVLYYNDKQQGGGGGG

SEQ ID NO: 616 - protein, 27 aa, Artificial Sequence
  Cyclic GFR-binding peptide
DAANNVPQDLSATSVLYYDAANNAAAA

SEQ ID NO: 617 - protein, 29 aa, Artificial Sequence
  Cyclic GFR-binding peptide
DSANNVPTEESATSVLYYDSANNAAAAAA

SEQ ID NO: 618 - protein, 27 aa, Artificial Sequence
  Cyclic GFR-binding peptide
DDSSNVPTGQSATSVLYYDDSSNGGGG

SEQ ID NO: 619 - protein, 29 aa, Artificial Sequence
  Cyclic GFR-binding peptide
DNGRVSRVHHSATSVLYYDNGRVGGGGGG

SEQ ID NO: 620 - protein, 27 aa, Artificial Sequence
  Cyclic GFR-binding peptide
VGRKPTQVQLSATSVLYYVGRKPAAAA

SEQ ID NO: 621 - protein, 29 aa, Artificial Sequence
  Cyclic GFR-binding peptide
IGKTPVPTELSPISVLYKIGKTPAAAAAA

SEQ ID NO: 622 - protein, 27 aa, Artificial Sequence
  Cyclic GFR-binding peptide
VGRTPVPTKMSPISVLYKVGRTPGGGG

SEQ ID NO: 623 - protein, 29 aa, Artificial Sequence
  Cyclic GFR-binding peptide
RIKPHVPTKLSPISVLYKRIKPHGGGGGG

SEQ ID NO: 624 - protein, 27 aa, Artificial Sequence
  Cyclic GFR-binding peptide
RIKPHVPTQLSPISVLYKRIKPHAAAA

SEQ ID NO: 625 - protein, 29 aa, Artificial Sequence
  Cyclic GFR-binding peptide
RIKPHVPTRLSPISVLYKRIKPHAAAAAA

SEQ ID NO: 626 - protein, 27 aa, Artificial Sequence
  Cyclic GFR-binding peptide
RIKPHVPTKTSPISVLYKRIKPHGGGG

SEQ ID NO: 627 - protein, 29 aa, Artificial Sequence
  Cyclic GFR-binding peptide
EYVRKVPTALSPISVLYKEYVRKGGGGGG

SEQ ID NO: 628 - protein, 27 aa, Artificial Sequence
  Cyclic GFR-binding peptide
EIVRKVPTDLSPISVLYKEIVRKAAAA

SEQ ID NO: 629 - protein, 27 aa, Artificial Sequence
  Cyclic GFR-binding peptide
DENEKVPEKMSPISVLYKDENEKGGGG

SEQ ID NO: 630 - protein, 29 aa, Artificial Sequence
  Cyclic GFR-binding peptide
DENKNAPTKLSPISVLYKDENKNGGGGGG

SEQ ID NO: 631 - protein, 27 aa, Artificial Sequence
  Cyclic GFR-binding peptide
DEYDKAPTQLSPISVLYKDEYDKAAAA

SEQ ID NO: 632 - protein, 29 aa, Artificial Sequence
  Cyclic GFR-binding peptide
DDSSNTPTKMSPISVLYKDDSSNAAAAAA

SEQ ID NO: 633 - protein, 27 aa, Artificial Sequence
  Cyclic GFR-binding peptide
DDSSNVPARLSPISVLYKDDSSNGGGG

SEQ ID NO: 634 - protein, 29 aa, Artificial Sequence
  Cyclic GFR-binding peptide
DDSSNAPVKTSPISVLYKDDSSNGGGGGG

SEQ ID NO: 635 - protein, 27 aa, Artificial Sequence
  Cyclic GFR-binding peptide
DSSNNVPQALSPISVLYKDSSNNAAAA

SEQ ID NO: 636 - protein, 29 aa, Artificial Sequence
  Cyclic GFR-binding peptide
DDMGVVSQDLSPISVLYKDDMGVAAAAAA

SEQ ID NO: 637 - protein, 27 aa, Artificial Sequence
  Cyclic GFR-binding peptide
DKGVVVPQDLSPISVLYKDKGVVGGGG

SEQ ID NO: 638 - protein, 29 aa, Artificial Sequence
  Cyclic GFR-binding peptide
NDKQQSRVHHSPISVLYKNDKQQGGGGGG

SEQ ID NO: 639 - protein, 27 aa, Artificial Sequence
  Cyclic GFR-binding peptide
DAANNTQVQLSPISVLYKDAANNAAAA

SEQ ID NO: 640 - protein, 29 aa, Artificial Sequence
  Cyclic GFR-binding peptide
DSANNVPTELEPISILYLDSANNAAAAAA

SEQ ID NO: 641 - protein, 27 aa, Artificial Sequence
  Cyclic GFR-binding peptide
DDSSNVPTKMEPISILYLDDSSNGGGG

SEQ ID NO: 642 - protein, 29 aa, Artificial Sequence
  Cyclic GFR-binding peptide
DNGRVVPTKLEPISILYLDNGRVGGGGGG

SEQ ID NO: 643 - protein, 27 aa, Artificial Sequence
  Cyclic GFR-binding peptide
VGRKPVPTQLEPISILYLVGRKPAAAA

SEQ ID NO: 644 - protein, 29 aa, Artificial Sequence
  Cyclic GFR-binding peptide
IGKTPVPTRLEPISILYLIGKTPAAAAAA

SEQ ID NO: 645 - protein, 27 aa, Artificial Sequence
  Cyclic GFR-binding peptide
VGRTPVPTKTEPISILYLVGRTPGGGG

SEQ ID NO: 646 - protein, 29 aa, Artificial Sequence
  Cyclic GFR-binding peptide
RIKPHVPTALEPISILYLRIKPHGGGGGG

SEQ ID NO: 647 - protein, 27 aa, Artificial Sequence
  Cyclic GFR-binding peptide
RIKPHVPTDLEPISILYLRIKPHAAAA

SEQ ID NO: 648 - protein, 29 aa, Artificial Sequence
  Cyclic GFR-binding peptide
RIKPHVPEKMEPISILYLRIKPHAAAAAA

SEQ ID NO: 649 - protein, 27 aa, Artificial Sequence
  Cyclic GFR-binding peptide
RIKPHAPTKLEPISILYLRIKPHGGGG

SEQ ID NO: 650 - protein, 29 aa, Artificial Sequence
  Cyclic GFR-binding peptide
EYVRKAPTQLEPISILYLEYVRKGGGGGG

SEQ ID NO: 651 - protein, 27 aa, Artificial Sequence
  Cyclic GFR-binding peptide
EIVRKTPTKMEPISILYLEIVRKAAAA

SEQ ID NO: 652 - protein, 27 aa, Artificial Sequence
  Cyclic GFR-binding peptide
DENEKVPARLEPISILYLDENEKGGGG

SEQ ID NO: 653 - protein, 29 aa, Artificial Sequence
  Cyclic GFR-binding peptide
DENKNAPVKTEPISILYLDENKNGGGGGG

SEQ ID NO: 654 - protein, 27 aa, Artificial Sequence
  Cyclic GFR-binding peptide
DEYDKVPQALEPISILYLDEYDKAAAA

SEQ ID NO: 655 - protein, 29 aa, Artificial Sequence
  Cyclic GFR-binding peptide
DDSSNVSQDLEPISILYLDDSSNAAAAAA

SEQ ID NO: 656 - protein, 27 aa, Artificial Sequence
  Cyclic GFR-binding peptide
DDSSNVPQDLEPISILYLDDSSNGGGG

SEQ ID NO: 657 - protein, 29 aa, Artificial Sequence
  Cyclic GFR-binding peptide
DDSSNSRVHHEPISILYLDDSSNGGGGGG

SEQ ID NO: 658 - protein, 27 aa, Artificial Sequence
  Cyclic GFR-binding peptide
DSSNNTQVQLEPISILYLDSSNNAAAA

SEQ ID NO: 659 - protein, 29 aa, Artificial Sequence
  Cyclic GFR-binding peptide
DDMGVTPTELSPINMLYFDDMGVAAAAAA

SEQ ID NO: 660 - protein, 27 aa, Artificial Sequence
  Cyclic GFR-binding peptide
DKGVVTPTKMSPINMLYFDKGVVGGGG

SEQ ID NO: 661 - protein, 29 aa, Artificial Sequence
  Cyclic GFR-binding peptide
NDKQQTPTKLSPINMLYFNDKQQGGGGGG

SEQ ID NO: 662 - protein, 27 aa, Artificial Sequence
  Cyclic GFR-binding peptide
DAANNTPTQLSPINMLYFDAANNAAAA

SEQ ID NO: 663 - protein, 29 aa, Artificial Sequence
  Cyclic GFR-binding peptide
DSANNTPTRLSPINMLYFDSANNAAAAAA

SEQ ID NO: 664 - protein, 27 aa, Artificial Sequence
  Cyclic GFR-binding peptide
DDSSNTPTKTSPINMLYFDDSSNGGGG

SEQ ID NO: 665 - protein, 29 aa, Artificial Sequence
  Cyclic GFR-binding peptide
DNGRVTPTALSPINMLYFDNGRVGGGGGG

SEQ ID NO: 666 - protein, 27 aa, Artificial Sequence
  Cyclic GFR-binding peptide
VGRKPTPTDLSPINMLYFVGRKPAAAA

SEQ ID NO: 667 - protein, 29 aa, Artificial Sequence
  Cyclic GFR-binding peptide
IGKTPVPTELSPINMLYFIGKTPAAAAAA

SEQ ID NO: 668 - protein, 27 aa, Artificial Sequence
  Cyclic GFR-binding peptide
VGRTPVPEKMSPINMLYFVGRTPGGGG

SEQ ID NO: 669 - protein, 29 aa, Artificial Sequence
  Cyclic GFR-binding peptide
RIKPHAPTKLSPINMLYFRIKPHGGGGGG

SEQ ID NO: 670 - protein, 27 aa, Artificial Sequence
  Cyclic GFR-binding peptide
RIKPHAPTQLSPINMLYFRIKPHAAAA

SEQ ID NO: 671 - protein, 29 aa, Artificial Sequence
  Cyclic GFR-binding peptide
RIKPHVPTKLSPINMLYFRIKPHAAAAAA

SEQ ID NO: 672 - protein, 27 aa, Artificial Sequence
  Cyclic GFR-binding peptide
RIKPHVPARLSPINMLYFRIKPHGGGG

SEQ ID NO: 673 - protein, 29 aa, Artificial Sequence
  Cyclic GFR-binding peptide
EYVRKVPTRLSPINMLYFEYVRKGGGGGG

SEQ ID NO: 674 - protein, 27 aa, Artificial Sequence
  Cyclic GFR-binding peptide
EIVRKAPVKTSPINMLYFEIVRKAAAA

SEQ ID NO: 675 - protein, 27 aa, Artificial Sequence
  Cyclic GFR-binding peptide
DENEKVPQALSPINMLYFDENEKGGGG

SEQ ID NO: 676 - protein, 29 aa, Artificial Sequence
  Cyclic GFR-binding peptide
DENKNVSQDLSPINMLYFDENKNGGGGGG

SEQ ID NO: 677 - protein, 27 aa, Artificial Sequence
  Cyclic GFR-binding peptide
DEYDKVPQDLSPINMLYFDEYDKAAAA

SEQ ID NO: 678 - protein, 29 aa, Artificial Sequence
  Cyclic GFR-binding peptide
DDSSNVPTEESPINMLYFDDSSNAAAAAA

SEQ ID NO: 679 - protein, 27 aa, Artificial Sequence
  Cyclic GFR-binding peptide
DDSSNVPTGQSPINMLYFDDSSNGGGG

SEQ ID NO: 680 - protein, 29 aa, Artificial Sequence
  Cyclic GFR-binding peptide
DDSSNSRVHHSPINMLYFDDSSNGGGGGG

SEQ ID NO: 681 - protein, 27 aa, Artificial Sequence
  Cyclic GFR-binding peptide
DSSNNTQVQLSPINMLYFDSSNNAAAA

SEQ ID NO: 682 - protein, 29 aa, Artificial Sequence
  Cyclic GFR-binding peptide
DDMGVVPAELSPISILYIDDMGVAAAAAA

SEQ ID NO: 683 - protein, 27 aa, Artificial Sequence
  Cyclic GFR-binding peptide
DKGVVVPAKMSPISILYIDKGVVGGGG

SEQ ID NO: 684 - protein, 29 aa, Artificial Sequence
  Cyclic GFR-binding peptide
NDKQQVPAKLSPISILYINDKQQGGGGGG

SEQ ID NO: 685 - protein, 27 aa, Artificial Sequence
  Cyclic GFR-binding peptide
DAANNVPAQLSPISILYIDAANNAAAA

SEQ ID NO: 686 - protein, 29 aa, Artificial Sequence
  Cyclic GFR-binding peptide
DSANNVPARLSPISILYIDSANNAAAAAA

SEQ ID NO: 687 - protein, 27 aa, Artificial Sequence
  Cyclic GFR-binding peptide
DDSSNVPAKTSPISILYIDDSSNGGGG

SEQ ID NO: 688 - protein, 29 aa, Artificial Sequence
  Cyclic GFR-binding peptide
DNGRVVPAALSPISILYIDNGRVGGGGGG

SEQ ID NO: 689 - protein, 27 aa, Artificial Sequence
  Cyclic GFR-binding peptide
VGRKPVPADLSPISILYIVGRKPAAAA

SEQ ID NO: 690 - protein, 29 aa, Artificial Sequence
  Cyclic GFR-binding peptide
IGKTPVPTELSPISILYIIGKTPAAAAAA

SEQ ID NO: 691 - protein, 27 aa, Artificial Sequence
  Cyclic GFR-binding peptide
VGRTPVPEKMSPISILYIVGRTPGGGG

SEQ ID NO: 692 - protein, 29 aa, Artificial Sequence
  Cyclic GFR-binding peptide
RIKPHAPTKLSPISILYIRIKPHGGGGGG

SEQ ID NO: 693 - protein, 27 aa, Artificial Sequence
  Cyclic GFR-binding peptide
RIKPHAPTQLSPISILYIRIKPHAAAA

SEQ ID NO: 694 - protein, 29 aa, Artificial Sequence
  Cyclic GFR-binding peptide
RIKPHVPTKLSPISILYIRIKPHAAAAAA

SEQ ID NO: 695 - protein, 27 aa, Artificial Sequence
  Cyclic GFR-binding peptide
RIKPHTPTKMSPISILYIRIKPHGGGG

SEQ ID NO: 696 - protein, 29 aa, Artificial Sequence
  Cyclic GFR-binding peptide
EYVRKVPTRLSPISILYIEYVRKGGGGGG

SEQ ID NO: 697 - protein, 27 aa, Artificial Sequence
  Cyclic GFR-binding peptide
EIVRKAPVKTSPISILYIEIVRKAAAA

SEQ ID NO: 698 - protein, 27 aa, Artificial Sequence
  Cyclic GFR-binding peptide
DENEKVPQALSPISILYIDENEKGGGG

SEQ ID NO: 699 - protein, 29 aa, Artificial Sequence
  Cyclic GFR-binding peptide
DENKNVSQDLSPISILYIDENKNGGGGGG

SEQ ID NO: 700 - protein, 27 aa, Artificial Sequence
  Cyclic GFR-binding peptide
DEYDKVPQDLSPISILYIDEYDKAAAA

SEQ ID NO: 701 - protein, 29 aa, Artificial Sequence
  Cyclic GFR-binding peptide
DDSSNVPTEESPISILYIDDSSNAAAAAA

SEQ ID NO: 702 - protein, 27 aa, Artificial Sequence
  Cyclic GFR-binding peptide
DDSSNVPTGQSPISILYIDDSSNGGGG

SEQ ID NO: 703 - protein, 29 aa, Artificial Sequence
  Cyclic GFR-binding peptide
DDSSNSRVHHSPISILYIDDSSNGGGGGG

SEQ ID NO: 704 - protein, 27 aa, Artificial Sequence
  Cyclic GFR-binding peptide
DSSNNTQVQLSPISILYIDSSNNAAAA

SEQ ID NO: 705 - protein, 29 aa, Artificial Sequence
  Cyclic GFR-binding peptide
DDMGVVPTELSPISILFIDDMGVAAAAAA

SEQ ID NO: 706 - protein, 27 aa, Artificial Sequence
  Cyclic GFR-binding peptide
DKGVVVPTKMSPISILFIDKGVVGGGG

SEQ ID NO: 707 - protein, 29 aa, Artificial Sequence
  Cyclic GFR-binding peptide
NDKQQVPTKLSPISILFINDKQQGGGGGG

SEQ ID NO: 708 - protein, 27 aa, Artificial Sequence
  Cyclic GFR-binding peptide
DAANNVPTQLSPISILFIDAANNAAAA

SEQ ID NO: 709 - protein, 29 aa, Artificial Sequence
  Cyclic GFR-binding peptide
DSANNVPTRLSPISILFIDSANNAAAAAA

SEQ ID NO: 710 - protein, 27 aa, Artificial Sequence
  Cyclic GFR-binding peptide
DDSSNVPTKTSPISILFIDDSSNGGGG

SEQ ID NO: 711 - protein, 29 aa, Artificial Sequence
  Cyclic GFR-binding peptide
DNGRVVPTALSPISILFIDNGRVGGGGGG

SEQ ID NO: 712 - protein, 27 aa, Artificial Sequence
  Cyclic GFR-binding peptide
VGRKPVPTDLSPISILFIVGRKPAAAA

SEQ ID NO: 713 - protein, 29 aa, Artificial Sequence
  Cyclic GFR-binding peptide
IGKTPVPEKMSPISILFIIGKTPAAAAAA

SEQ ID NO: 714 - protein, 27 aa, Artificial Sequence
  Cyclic GFR-binding peptide
VGRTPAPTKLSPISILFIVGRTPGGGG

SEQ ID NO: 715 - protein, 29 aa, Artificial Sequence
  Cyclic GFR-binding peptide
RIKPHAPTQLSPISILFIRIKPHGGGGGG

SEQ ID NO: 716 - protein, 27 aa, Artificial Sequence
  Cyclic GFR-binding peptide
RIKPHTPTKMSPISILFIRIKPHAAAA

SEQ ID NO: 717 - protein, 29 aa, Artificial Sequence
  Cyclic GFR-binding peptide
RIKPHVPARLSPISILFIRIKPHAAAAAA

SEQ ID NO: 718 - protein, 27 aa, Artificial Sequence
  Cyclic GFR-binding peptide
RIKPHAPVKTSPISILFIRIKPHGGGG

SEQ ID NO: 719 - protein, 29 aa, Artificial Sequence
  Cyclic GFR-binding peptide
EYVRKVPQALSPISILFIEYVRKGGGGGG

SEQ ID NO: 720 - protein, 27 aa, Artificial Sequence
  Cyclic GFR-binding peptide
EIVRKVSQDLSPISILFIEIVRKAAAA

SEQ ID NO: 721 - protein, 27 aa, Artificial Sequence
  Cyclic GFR-binding peptide
DENEKVPQDLSPISILFIDENEKGGGG

SEQ ID NO: 722 - protein, 29 aa, Artificial Sequence
  Cyclic GFR-binding peptide
DENKNSRVHHSPISILFIDENKNGGGGGG

SEQ ID NO: 723 - protein, 27 aa, Artificial Sequence
  Cyclic GFR-binding peptide
DEYDKTQVQLSPISILFIDEYDKAAAA

SEQ ID NO: 724 - protein, 29 aa, Artificial Sequence
  Cyclic GFR-binding peptide
DDSSNAPVELKPLSMLYVDDSSNAAAAAA

SEQ ID NO: 725 - protein, 27 aa, Artificial Sequence
  Cyclic GFR-binding peptide
DDSSNAPVKMKPLSMLYVDDSSNGGGG

SEQ ID NO: 726 - protein, 29 aa, Artificial Sequence
  Cyclic GFR-binding peptide
DDSSNAPVKLKPLSMLYVDDSSNGGGGGG

SEQ ID NO: 727 - protein, 27 aa, Artificial Sequence
  Cyclic GFR-binding peptide
DSSNNAPVQLKPLSMLYVDSSNNAAAA

SEQ ID NO: 728 - protein, 29 aa, Artificial Sequence
  Cyclic GFR-binding peptide
DDMGVAPVRLKPLSMLYVDDMGVAAAAAA

SEQ ID NO: 729 - protein, 27 aa, Artificial Sequence
  Cyclic GFR-binding peptide
DKGVVAPVALKPLSMLYVDKGVVGGGG

SEQ ID NO: 730 - protein, 29 aa, Artificial Sequence
  Cyclic GFR-binding peptide
NDKQQAPVDLKPLSMLYVNDKQQGGGGGG

SEQ ID NO: 731 - protein, 27 aa, Artificial Sequence
  Cyclic GFR-binding peptide
DAANNVPTELKPLSMLYVDAANNAAAA

SEQ ID NO: 732 - protein, 29 aa, Artificial Sequence
  Cyclic GFR-binding peptide
DSANNVPEKMKPLSMLYVDSANNAAAAAA

SEQ ID NO: 733 - protein, 27 aa, Artificial Sequence
  Cyclic GFR-binding peptide
DDSSNAPTKLKPLSMLYVDDSSNGGGG

SEQ ID NO: 734 - protein, 29 aa, Artificial Sequence
  Cyclic GFR-binding peptide
DNGRVAPTQLKPLSMLYVDNGRVGGGGGG

SEQ ID NO: 735 - protein, 27 aa, Artificial Sequence
  Cyclic GFR-binding peptide
VGRKPVPTKLKPLSMLYVVGRKPAAAA

SEQ ID NO: 736 - protein, 29 aa, Artificial Sequence
  Cyclic GFR-binding peptide
IGKTPTPTKMKPLSMLYVIGKTPAAAAAA

SEQ ID NO: 737 - protein, 27 aa, Artificial Sequence
  Cyclic GFR-binding peptide
DENEKVPARLKPLSMLYVVGRTPGGGG

SEQ ID NO: 738 - protein, 29 aa, Artificial Sequence
  Cyclic GFR-binding peptide
DENKNVPTRLKPLSMLYVRIKPHGGGGGG

SEQ ID NO: 739 - protein, 27 aa, Artificial Sequence
  Cyclic GFR-binding peptide
DEYDKVPQALKPLSMLYVRIKPHAAAA

SEQ ID NO: 740 - protein, 29 aa, Artificial Sequence
  Cyclic GFR-binding peptide
DDSSNVSQDLKPLSMLYVRIKPHAAAAAA

SEQ ID NO: 741 - protein, 27 aa, Artificial Sequence
  Cyclic GFR-binding peptide
DDSSNVPQDLKPLSMLYVRIKPHGGGG

SEQ ID NO: 742 - protein, 29 aa, Artificial Sequence
  Cyclic GFR-binding peptide
DDSSNVPTEEKPLSMLYVEYVRKGGGGGG

SEQ ID NO: 743 - protein, 27 aa, Artificial Sequence
  Cyclic GFR-binding peptide
DSSNNVPTGQKPLSMLYVEIVRKAAAA

SEQ ID NO: 744 - protein, 27 aa, Artificial Sequence
  Cyclic GFR-binding peptide
DDMGVSRVHHKPLSMLYVDENEKGGGG

SEQ ID NO: 745 - protein, 29 aa, Artificial Sequence
  Cyclic GFR-binding peptide
DKGVVTQVQLKPLSMLYVDENKNGGGGGG

SEQ ID NO: 746 - protein, 27 aa, Artificial Sequence
  Cyclic GFR-binding peptide
NDKQQVPQELEPLPIVYYDEYDKAAAA

SEQ ID NO: 747 - protein, 29 aa, Artificial Sequence
  Cyclic GFR-binding peptide
DAANNVPQKMEPLPIVYYDDSSNAAAAAA

SEQ ID NO: 748 - protein, 27 aa, Artificial Sequence
  Cyclic GFR-binding peptide
DSANNVPQKLEPLPIVYYDDSSNGGGG

SEQ ID NO: 749 - protein, 29 aa, Artificial Sequence
  Cyclic GFR-binding peptide
DDSSNVPQQLEPLPIVYYDDSSNGGGGGG

SEQ ID NO: 750 - protein, 27 aa, Artificial Sequence
  Cyclic GFR-binding peptide
DNGRVVPQRLEPLPIVYYDSSNNAAAA

SEQ ID NO: 751 - protein, 29 aa, Artificial Sequence
  Cyclic GFR-binding peptide
VGRKPVPQKTEPLPIVYYDDMGVAAAAAA

SEQ ID NO: 752 - protein, 27 aa, Artificial Sequence
  Cyclic GFR-binding peptide
IGKTPVPQDLEPLPIVYYDKGVVGGGG

SEQ ID NO: 753 - protein, 29 aa, Artificial Sequence
  Cyclic GFR-binding peptide
VGRTPVPTELEPLPIVYYNDKQQGGGGGG

SEQ ID NO: 754 - protein, 27 aa, Artificial Sequence
  Cyclic GFR-binding peptide
RIKPHVPEKMEPLPIVYYDAANNAAAA

SEQ ID NO: 755 - protein, 29 aa, Artificial Sequence
  Cyclic GFR-binding peptide
RIKPHAPTKLEPLPIVYYDSANNAAAAAA

SEQ ID NO: 756 - protein, 27 aa, Artificial Sequence
  Cyclic GFR-binding peptide
RIKPHAPTQLEPLPIVYYDDSSNGGGG

SEQ ID NO: 757 - protein, 29 aa, Artificial Sequence
  Cyclic GFR-binding peptide
RIKPHVPTKLEPLPIVYYDNGRVGGGGGG

SEQ ID NO: 758 - protein, 27 aa, Artificial Sequence
  Cyclic GFR-binding peptide
EYVRKTPTKMEPLPIVYYVGRKPAAAA

SEQ ID NO: 759 - protein, 29 aa, Artificial Sequence
  Cyclic GFR-binding peptide
EIVRKVPARLEPLPIVYYIGKTPAAAAAA

SEQ ID NO: 760 - protein, 27 aa, Artificial Sequence
  Cyclic GFR-binding peptide
DENEKVPTRLEPLPIVYYVGRTPGGGG

SEQ ID NO: 761 - protein, 29 aa, Artificial Sequence
  Cyclic GFR-binding peptide
DENKNAPVKTEPLPIVYYRIKPHGGGGGG

SEQ ID NO: 762 - protein, 27 aa, Artificial Sequence
  Cyclic GFR-binding peptide
DEYDKVSQDLEPLPIVYYRIKPHAAAA

SEQ ID NO: 763 - protein, 29 aa, Artificial Sequence
  Cyclic GFR-binding peptide
DDSSNVPTEEEPLPIVYYRIKPHAAAAAA

SEQ ID NO: 764 - protein, 27 aa, Artificial Sequence
  Cyclic GFR-binding peptide
DDSSNVPTGQEPLPIVYYRIKPHGGGG

SEQ ID NO: 765 - protein, 29 aa, Artificial Sequence
  Cyclic GFR-binding peptide
DDSSNSRVHHEPLPIVYYEYVRKGGGGGG

SEQ ID NO: 766 - protein, 27 aa, Artificial Sequence
  Cyclic GFR-binding peptide
DSSNNTQVQLEPLPIVYYEIVRKAAAA

SEQ ID NO: 767 - protein, 27 aa, Artificial Sequence
  Cyclic GFR-binding peptide
DDMGVVSQELEPLTILYYDENEKGGGG

SEQ ID NO: 768 - protein, 29 aa, Artificial Sequence
  Cyclic GFR-binding peptide
DKGVVVSQKMEPLTILYYDENKNGGGGGG

SEQ ID NO: 769 - protein, 27 aa, Artificial Sequence
  Cyclic GFR-binding peptide
NDKQQVSQKLEPLTILYYDEYDKAAAA

SEQ ID NO: 770 - protein, 29 aa, Artificial Sequence
  Cyclic GFR-binding peptide
DAANNVSQQLEPLTILYYDDSSNAAAAAA

SEQ ID NO: 771 - protein, 27 aa, Artificial Sequence
  Cyclic GFR-binding peptide
DSANNVSQRLEPLTILYYDDSSNGGGG

SEQ ID NO: 772 - protein, 29 aa, Artificial Sequence
  Cyclic GFR-binding peptide
DDSSNVSQKTEPLTILYYDDSSNGGGGGG

SEQ ID NO: 773 - protein, 27 aa, Artificial Sequence
  Cyclic GFR-binding peptide
DNGRVVSQALEPLTILYYDSSNNAAAA

SEQ ID NO: 774 - protein, 29 aa, Artificial Sequence
  Cyclic GFR-binding peptide
VGRKPVSQDLEPLTILYYDDMGVAAAAAA

SEQ ID NO: 775 - protein, 27 aa, Artificial Sequence
  Cyclic GFR-binding peptide
IGKTPVPTELEPLTILYYDKGVVGGGG

SEQ ID NO: 776 - protein, 29 aa, Artificial Sequence
  Cyclic GFR-binding peptide
VGRTPVPEKMEPLTILYYNDKQQGGGGGG

SEQ ID NO: 777 - protein, 27 aa, Artificial Sequence
  Cyclic GFR-binding peptide
RIKPHAPTKLEPLTILYYDAANNAAAA

SEQ ID NO: 778 - protein, 29 aa, Artificial Sequence
  Cyclic GFR-binding peptide
RIKPHAPTQLEPLTILYYDSANNAAAAAA

SEQ ID NO: 779 - protein, 27 aa, Artificial Sequence
  Cyclic GFR-binding peptide
RIKPHVPTKLEPLTILYYDDSSNGGGG

SEQ ID NO: 780 - protein, 29 aa, Artificial Sequence
  Cyclic GFR-binding peptide
RIKPHTPTKMEPLTILYYDNGRVGGGGGG

SEQ ID NO: 781 - protein, 27 aa, Artificial Sequence
  Cyclic GFR-binding peptide
EYVRKVPARLEPLTILYYVGRKPAAAA

SEQ ID NO: 782 - protein, 29 aa, Artificial Sequence
  Cyclic GFR-binding peptide
EIVRKVPTRLEPLTILYYIGKTPAAAAAA

SEQ ID NO: 783 - protein, 27 aa, Artificial Sequence
  Cyclic GFR-binding peptide
DENEKAPVKTEPLTILYYVGRTPGGGG

SEQ ID NO: 784 - protein, 29 aa, Artificial Sequence
  Cyclic GFR-binding peptide
DENKNVPQALEPLTILYYRIKPHGGGGGG

SEQ ID NO: 785 - protein, 27 aa, Artificial Sequence
  Cyclic GFR-binding peptide
DEYDKVPTEEEPLTILYYRIKPHAAAA

SEQ ID NO: 786 - protein, 29 aa, Artificial Sequence
  Cyclic GFR-binding peptide
DDSSNVPTGQEPLTILYYRIKPHAAAAAA

SEQ ID NO: 787 - protein, 27 aa, Artificial Sequence
  Cyclic GFR-binding peptide
DDSSNSRVHHEPLTILYYRIKPHGGGG

SEQ ID NO: 788 - protein, 29 aa, Artificial Sequence
  Cyclic GFR-binding peptide
DDSSNTQVQLEPLTILYYEYVRKGGGGGG

SEQ ID NO: 789 - protein, 27 aa, Artificial Sequence
  Cyclic GFR-binding peptide
DSSNNVPQELEPLTILYYEIVRKAAAA

SEQ ID NO: 790 - protein, 27 aa, Artificial Sequence
  Cyclic GFR-binding peptide
DDMGVVPQKMEPLTILYYDENEKGGGG

SEQ ID NO: 791 - protein, 29 aa, Artificial Sequence
  Cyclic GFR-binding peptide
DKGVVVPQKLEPLTILYYDENKNGGGGGG

SEQ ID NO: 792 - protein, 27 aa, Artificial Sequence
  Cyclic GFR-binding peptide
NDKQQVPQQLEPLTILYYDEYDKAAAA

SEQ ID NO: 793 - protein, 29 aa, Artificial Sequence
  Cyclic GFR-binding peptide
DAANNVPQRLEPLTILYYDDSSNAAAAAA

SEQ ID NO: 794 - protein, 27 aa, Artificial Sequence
  Cyclic GFR-binding peptide
DSANNVPQKTEPLTILYYDDSSNGGGG

SEQ ID NO: 795 - protein, 29 aa, Artificial Sequence
  Cyclic GFR-binding peptide
DDSSNVPQDLEPLTILYYDDSSNGGGGGG

SEQ ID NO: 796 - protein, 27 aa, Artificial Sequence
  Cyclic GFR-binding peptide
DNGRVVPTGQSNITMQIMDSSNNAAAA

SEQ ID NO: 797 - protein, 29 aa, Artificial Sequence
  Cyclic GFR-binding peptide
VGRKPVPEKMSNITMQIMDDMGVAAAAAA

SEQ ID NO: 798 - protein, 27 aa, Artificial Sequence
  Cyclic GFR-binding peptide
IGKTPAPTKLSNITMQIMDKGVVGGGG

SEQ ID NO: 799 - protein, 29 aa, Artificial Sequence
  Cyclic GFR-binding peptide
VGRTPAPTQLSNITMQIMNDKQQGGGGGG

SEQ ID NO: 800 - protein, 27 aa, Artificial Sequence
  Cyclic GFR-binding peptide
RIKPHTPTKMSNITMQIMDAANNAAAA

SEQ ID NO: 801 - protein, 29 aa, Artificial Sequence
  Cyclic GFR-binding peptide
RIKPHVPARLSNITMQIMDSANNAAAAAA

SEQ ID NO: 802 - protein, 27 aa, Artificial Sequence
  Cyclic GFR-binding peptide
RIKPHAPVKTSNITMQIMDDSSNGGGG

SEQ ID NO: 803 - protein, 29 aa, Artificial Sequence
  Cyclic GFR-binding peptide
RIKPHVPQALSNITMQIMDNGRVGGGGGG

SEQ ID NO: 804 - protein, 27 aa, Artificial Sequence
  Cyclic GFR-binding peptide
EYVRKVSQDLSNITMQIMVGRKPAAAA

SEQ ID NO: 805 - protein, 29 aa, Artificial Sequence
  Cyclic GFR-binding peptide
EIVRKVPQDLSNITMQIMIGKTPAAAAAA

SEQ ID NO: 806 - protein, 27 aa, Artificial Sequence
  Cyclic GFR-binding peptide
DENEKSRVHHSNITMQIMVGRTPGGGG

SEQ ID NO: 807 - protein, 29 aa, Artificial Sequence
  Cyclic GFR-binding peptide
DENKNTQVQLSNITMQIMRIKPHGGGGGG

SEQ ID NO: 808 - protein, 27 aa, Artificial Sequence
  Cyclic GFR-binding peptide
DEYDKSRVQLRSVKVAKVRIKPHAAAA

SEQ ID NO: 809 - protein, 29 aa, Artificial Sequence
  Cyclic GFR-binding peptide
DDSSNVPTELRSVKVAKVRIKPHAAAAAA

SEQ ID NO: 810 - protein, 27 aa, Artificial Sequence
  Cyclic GFR-binding peptide
DDSSNVPEKMRSVKVAKVRIKPHGGGG

SEQ ID NO: 811 - protein, 29 aa, Artificial Sequence
  Cyclic GFR-binding peptide
DDSSNAPTKLRSVKVAKVEYVRKGGGGGG

SEQ ID NO: 812 - protein, 27 aa, Artificial Sequence
  Cyclic GFR-binding peptide
DSSNNAPTQLRSVKVAKVEIVRKAAAA

SEQ ID NO: 813 - protein, 27 aa, Artificial Sequence
  Cyclic GFR-binding peptide
DDMGVVPTKLRSVKVAKVDENEKGGGG

SEQ ID NO: 814 - protein, 29 aa, Artificial Sequence
  Cyclic GFR-binding peptide
DKGVVTPTKMRSVKVAKVDENKNGGGGGG

SEQ ID NO: 815 - protein, 27 aa, Artificial Sequence
  Cyclic GFR-binding peptide
NDKQQVPARLRSVKVAKVDEYDKAAAA

SEQ ID NO: 816 - protein, 29 aa, Artificial Sequence
  Cyclic GFR-binding peptide
DAANNVPTRLRSVKVAKVDDSSNAAAAAA

SEQ ID NO: 817 - protein, 27 aa, Artificial Sequence
  Cyclic GFR-binding peptide
DSANNAPVKTRSVKVAKVDDSSNGGGG

SEQ ID NO: 818 - protein, 29 aa, Artificial Sequence
  Cyclic GFR-binding peptide
DDSSNVPQALRSVKVAKVDDSSNGGGGGG

SEQ ID NO: 819 - protein, 27 aa, Artificial Sequence
  Cyclic GFR-binding peptide
DNGRVVSQDLRSVKVAKVDSSNNAAAA

SEQ ID NO: 820 - protein, 29 aa, Artificial Sequence
  Cyclic GFR-binding peptide
VGRKPVPQDLRSVKVAKVDDMGVAAAAAA

SEQ ID NO: 821 - protein, 27 aa, Artificial Sequence
  Cyclic GFR-binding peptide
IGKTPVPTEERSVKVAKVDKGVVGGGG

SEQ ID NO: 822 - protein, 29 aa, Artificial Sequence
  Cyclic GFR-binding peptide
VGRTPVPTGQRSVKVAKVNDKQQGGGGGG

SEQ ID NO: 823 - protein, 27 aa, Artificial Sequence
  Cyclic GFR-binding peptide
RIKPHTQVQLRSVKVAKVDAANNAAAA

SEQ ID NO: 824 - protein, 29 aa, Artificial Sequence
  Cyclic GFR-binding peptide
RIKPHTQVHHRPVQVRKIDSANNAAAAAA

SEQ ID NO: 825 - protein, 27 aa, Artificial Sequence
  Cyclic GFR-binding peptide
RIKPHVPTELRPVQVRKIDDSSNGGGG

SEQ ID NO: 826 - protein, 29 aa, Artificial Sequence
  Cyclic GFR-binding peptide
RIKPHVPEKMRPVQVRKIDNGRVGGGGGG

SEQ ID NO: 827 - protein, 27 aa, Artificial Sequence
  Cyclic GFR-binding peptide
EYVRKAPTKLRPVQVRKIVGRKPAAAA

SEQ ID NO: 828 - protein, 29 aa, Artificial Sequence
  Cyclic GFR-binding peptide
EIVRKAPTQLRPVQVRKIIGKTPAAAAAA

SEQ ID NO: 829 - protein, 27 aa, Artificial Sequence
  Cyclic GFR-binding peptide
DENEKVPTKLRPVQVRKIVGRTPGGGG

SEQ ID NO: 830 - protein, 29 aa, Artificial Sequence
  Cyclic GFR-binding peptide
DENKNTPTKMRPVQVRKIRIKPHGGGGGG

SEQ ID NO: 831 - protein, 27 aa, Artificial Sequence
  Cyclic GFR-binding peptide
DEYDKVPARLRPVQVRKIRIKPHAAAA

SEQ ID NO: 832 - protein, 29 aa, Artificial Sequence
  Cyclic GFR-binding peptide
DDSSNVPTRLRPVQVRKIRIKPHAAAAAA

SEQ ID NO: 833 - protein, 27 aa, Artificial Sequence
  Cyclic GFR-binding peptide
DDSSNAPVKTRPVQVRKIRIKPHGGGG

SEQ ID NO: 834 - protein, 29 aa, Artificial Sequence
  Cyclic GFR-binding peptide
DDSSNVPQALRPVQVRKIEYVRKGGGGGG

SEQ ID NO: 835 - protein, 27 aa, Artificial Sequence
  Cyclic GFR-binding peptide
DSSNNVSQDLRPVQVRKIEIVRKAAAA

SEQ ID NO: 836 - protein, 27 aa, Artificial Sequence
  Cyclic GFR-binding peptide
DDMGVVPQDLRPVQVRKIDENEKGGGG

SEQ ID NO: 837 - protein, 29 aa, Artificial Sequence
  Cyclic GFR-binding peptide
DKGVVVPTEERPVQVRKIDENKNGGGGGG

SEQ ID NO: 838 - protein, 27 aa, Artificial Sequence
  Cyclic GFR-binding peptide
NDKQQVPTGQRPVQVRKIDEYDKAAAA

SEQ ID NO: 839 - protein, 29 aa, Artificial Sequence
  Cyclic GFR-binding peptide
DAANNSRVHHRPVQVRKIDDSSNAAAAAA

SEQ ID NO: 840 - protein, 27 aa, Artificial Sequence
  Cyclic GFR-binding peptide
GGGGKENEDLYLMSIASMKTPVGWFWW

SEQ ID NO: 841 - protein, 29 aa, Artificial Sequence
  Cyclic GFR-binding peptide
GGGGGGNKNEDLYLMSIASLKTPVPGPTG

SEQ ID NO: 842 - protein, 28 aa, Artificial Sequence
  Cyclic GFR-binding peptide
AAAAKDYEDLYLMSIASLQTPVGGWFWW

SEQ ID NO: 843 - protein, 30 aa, Artificial Sequence
  Cyclic GFR-binding peptide
AAAAAANSSDDLYLMSIASLRTPVGPGPTG

SEQ ID NO: 844 - protein, 29 aa, Artificial Sequence
  Cyclic GFR-binding peptide
GGGGNSSDDLYLMSIASTKTPVGGGWFWW

SEQ ID NO: 845 - protein, 31 aa, Artificial Sequence
  Cyclic GFR-binding peptide
GGGGGGNSSDDLYLMSIASLATPVGGPGPTG

SEQ ID NO: 846 - protein, 30 aa, Artificial Sequence
  Cyclic GFR-binding peptide
AAAANNSSDLYLMSIASLDTPVGGGGWFWW

SEQ ID NO: 847 - protein, 32 aa, Artificial Sequence
  Cyclic GFR-binding peptide
AAAAAAVGMDDLYLMSIASMKEPVGGGPGPTG

SEQ ID NO: 848 - protein, 27 aa, Artificial Sequence
  Cyclic GFR-binding peptide
GGGGVVGKDLYLMSIASLKTPAGWFWW

SEQ ID NO: 849 - protein, 29 aa, Artificial Sequence
  Cyclic GFR-binding peptide
GGGGGGQQKDNLYLMSIASLQTPAPGPTG

SEQ ID NO: 850 - protein, 28 aa, Artificial Sequence
  Cyclic GFR-binding peptide
AAAANNAADLYLMSIASMKTPTGGWFWW

SEQ ID NO: 851 - protein, 30 aa, Artificial Sequence
  Cyclic GFR-binding peptide
AAAAAANNASDLYLMSIASLRAPVGPGPTG

SEQ ID NO: 852 - protein, 29 aa, Artificial Sequence
  Cyclic GFR-binding peptide
GGGGNSSDDLYLMSIASTKVPAGGGWFWW

SEQ ID NO: 853 - protein, 31 aa, Artificial Sequence
  Cyclic GFR-binding peptide
GGGGGGVRGNDLYLMSIASLAQPVGGPGPTG

SEQ ID NO: 854 - protein, 30 aa, Artificial Sequence
  Cyclic GFR-binding peptide
AAAAPKRGVLYLMSIASLDQSVGGGGWFWW

SEQ ID NO: 855 - protein, 32 aa, Artificial Sequence
  Cyclic GFR-binding peptide
AAAAAAPTKGILYLMSIASLDQPVGGGPGPTG

SEQ ID NO: 856 - protein, 27 aa, Artificial Sequence
  Cyclic GFR-binding peptide
GGGGPTRGVLYLMSIASHHVRSGWFWW

SEQ ID NO: 857 - protein, 29 aa, Artificial Sequence
  Cyclic GFR-binding peptide
GGGGGGHPKIRLYLMSIASLQVQTPGPTG

SEQ ID NO: 858 - protein, 28 aa, Artificial Sequence
  Cyclic GFR-binding peptide
AAAAHPKIRFFLISLSSLEEPVGGWFWW

SEQ ID NO: 859 - protein, 30 aa, Artificial Sequence
  Cyclic GFR-binding peptide
AAAAAAHPKIRFFLISLSSLKEPVGPGPTG

SEQ ID NO: 860 - protein, 29 aa, Artificial Sequence
  Cyclic GFR-binding peptide
GGGGHPKIRFFLISLSSLQEPVGGGWFWW

SEQ ID NO: 861 - protein, 31 aa, Artificial Sequence
  Cyclic GFR-binding peptide
GGGGGGKRVYEFFLISLSSMKEPVGGPGPTG

SEQ ID NO: 862 - protein, 30 aa, Artificial Sequence
  Cyclic GFR-binding peptide
AAAAKRVIEFFLISLSSLREPVGGGGWFWW

SEQ ID NO: 863 - protein, 30 aa, Artificial Sequence
  Cyclic GFR-binding peptide
GGGGKENEDFFLISLSSTKEPVGGGPGPTG

SEQ ID NO: 864 - protein, 29 aa, Artificial Sequence
  Cyclic GFR-binding peptide
GGGGGGNKNEDFFLISLSSLAEPVGWFWW

SEQ ID NO: 865 - protein, 27 aa, Artificial Sequence
  Cyclic GFR-binding peptide
AAAAKDYEDFFLISLSSLDEPVPGPTG

SEQ ID NO: 866 - protein, 30 aa, Artificial Sequence
  Cyclic GFR-binding peptide
AAAAAANSSDDFFLISLSSLETPVGGWFWW

SEQ ID NO: 867 - protein, 28 aa, Artificial Sequence
  Cyclic GFR-binding peptide
GGGGNSSDDFFLISLSSLKTPAGPGPTG

SEQ ID NO: 868 - protein, 31 aa, Artificial Sequence
  Cyclic GFR-binding peptide
GGGGGGNSSDDFFLISLSSLQTPAGGGWFWW

SEQ ID NO: 869 - protein, 29 aa, Artificial Sequence
  Cyclic GFR-binding peptide
AAAANNSSDFFLISLSSLKTPVGGPGPTG

SEQ ID NO: 870 - protein, 32 aa, Artificial Sequence
  Cyclic GFR-binding peptide
AAAAAAVGMDDFFLISLSSMKTPTGGGGWFWW

SEQ ID NO: 871 - protein, 30 aa, Artificial Sequence
  Cyclic GFR-binding peptide
GGGGVVGKDFFLISLSSLRAPVGGGPGPTG

SEQ ID NO: 872 - protein, 29 aa, Artificial Sequence
  Cyclic GFR-binding peptide
GGGGGGQQKDNFFLISLSSLRTPVGWFWW

SEQ ID NO: 873 - protein, 27 aa, Artificial Sequence
  Cyclic GFR-binding peptide
AAAANNAADFFLISLSSTKVPAPGPTG

SEQ ID NO: 874 - protein, 30 aa, Artificial Sequence
  Cyclic GFR-binding peptide
AAAAAANNASDFFLISLSSLAQPVGGWFWW

SEQ ID NO: 875 - protein, 28 aa, Artificial Sequence
  Cyclic GFR-binding peptide
GGGGNSSDDFFLISLSSLDQSVGPGPTG

SEQ ID NO: 876 - protein, 31 aa, Artificial Sequence
  Cyclic GFR-binding peptide
GGGGGGVRGNDFFLISLSSLDQPVGGGWFWW

SEQ ID NO: 877 - protein, 29 aa, Artificial Sequence
  Cyclic GFR-binding peptide
AAAAPKRGVFFLISLSSEETPVGGPGPTG

SEQ ID NO: 878 - protein, 32 aa, Artificial Sequence
  Cyclic GFR-binding peptide
AAAAAAPTKGIFFLISLSSQGTPVGGGGWFWW

SEQ ID NO: 879 - protein, 30 aa, Artificial Sequence
  Cyclic GFR-binding peptide
GGGGPTRGVFFLISLSSHHVRSGGGPGPTG

SEQ ID NO: 880 - protein, 29 aa, Artificial Sequence
  Cyclic GFR-binding peptide
GGGGGGHPKIRFFLISLSSLQVQTGWFWW

SEQ ID NO: 881 - protein, 27 aa, Artificial Sequence
  Cyclic GFR-binding peptide
AAAAHPKIRFYLVSIANLETPAPGPTG

SEQ ID NO: 882 - protein, 30 aa, Artificial Sequence
  Cyclic GFR-binding peptide
AAAAAAHPKIRFYLVSIANMKTPAGGWFWW

SEQ ID NO: 883 - protein, 28 aa, Artificial Sequence
  Cyclic GFR-binding peptide
GGGGHPKIRFYLVSIANLKTPAGPGPTG

SEQ ID NO: 884 - protein, 31 aa, Artificial Sequence
  Cyclic GFR-binding peptide
GGGGGGKRVYEFYLVSIANLRTPAGGGWFWW

SEQ ID NO: 885 - protein, 29 aa, Artificial Sequence
  Cyclic GFR-binding peptide
AAAAKRVIEFYLVSIANTKTPAGGPGPTG

SEQ ID NO: 886 - protein, 30 aa, Artificial Sequence
  Cyclic GFR-binding peptide
GGGGKENEDFYLVSIANLATPAGGGGWFWW

SEQ ID NO: 887 - protein, 32 aa, Artificial Sequence
  Cyclic GFR-binding peptide
GGGGGGNKNEDFYLVSIANLDTPAGGGPGPTG

SEQ ID NO: 888 - protein, 27 aa, Artificial Sequence
  Cyclic GFR-binding peptide
AAAAKDYEDFYLVSIANLETPVGWFWW

SEQ ID NO: 889 - protein, 29 aa, Artificial Sequence
  Cyclic GFR-binding peptide
AAAAAANSSDDFYLVSIANMKEPVPGPTG

SEQ ID NO: 890 - protein, 28 aa, Artificial Sequence
  Cyclic GFR-binding peptide
GGGGNSSDDFYLVSIANLKTPVGGWFWW

SEQ ID NO: 891 - protein, 30 aa, Artificial Sequence
  Cyclic GFR-binding peptide
GGGGGGNSSDDFYLVSIANMKTPTGPGPTG

SEQ ID NO: 892 - protein, 29 aa, Artificial Sequence
  Cyclic GFR-binding peptide
AAAANNSSDFYLVSIANLRAPVGGGWFWW

SEQ ID NO: 893 - protein, 31 aa, Artificial Sequence
  Cyclic GFR-binding peptide
AAAAAAVGMDDFYLVSIANLRTPVGGPGPTG

SEQ ID NO: 894 - protein, 30 aa, Artificial Sequence
  Cyclic GFR-binding peptide
GGGGVVGKDFYLVSIANTKVPAGGGGWFWW

SEQ ID NO: 895 - protein, 32 aa, Artificial Sequence
  Cyclic GFR-binding peptide
GGGGGGQQKDNFYLVSIANLAQPVGGGPGPTG

SEQ ID NO: 896 - protein, 27 aa, Artificial Sequence
  Cyclic GFR-binding peptide
AAAANNAADFYLVSIANLDQSVGWFWW

SEQ ID NO: 897 - protein, 29 aa, Artificial Sequence
  Cyclic GFR-binding peptide
AAAAAANNASDFYLVSIANLDQPVPGPTG

SEQ ID NO: 898 - protein, 28 aa, Artificial Sequence
  Cyclic GFR-binding peptide
GGGGNSSDDFYLVSIANEETPVGGWFWW

SEQ ID NO: 899 - protein, 30 aa, Artificial Sequence
  Cyclic GFR-binding peptide
GGGGGGVRGNDFYLVSIANQGTPVGPGPTG

SEQ ID NO: 900 - protein, 29 aa, Artificial Sequence
  Cyclic GFR-binding peptide
AAAAPKRGVFYLVSIANHHVRSGGGWFWW

SEQ ID NO: 901 - protein, 31 aa, Artificial Sequence
  Cyclic GFR-binding peptide
AAAAAAPTKGIFYLVSIANLQVQTGGPGPTG

SEQ ID NO: 902 - protein, 30 aa, Artificial Sequence
  Cyclic GFR-binding peptide
GGGGPTRGVYYLVSTASLETPAGGGGWFWW

SEQ ID NO: 903 - protein, 32 aa, Artificial Sequence
  Cyclic GFR-binding peptide
GGGGGGHPKIRYYLVSTASMKTPAGGGPGPTG

SEQ ID NO: 904 - protein, 27 aa, Artificial Sequence
  Cyclic GFR-binding peptide
AAAAHPKIRYYLVSTASLKTPAGWFWW

SEQ ID NO: 905 - protein, 29 aa, Artificial Sequence
  Cyclic GFR-binding peptide
AAAAAAHPKIRYYLVSTASLQTPAPGPTG

SEQ ID NO: 906 - protein, 28 aa, Artificial Sequence
  Cyclic GFR-binding peptide
GGGGHPKIRYYLVSTASLRTPAGGWFWW

SEQ ID NO: 907 - protein, 30 aa, Artificial Sequence
  Cyclic GFR-binding peptide
GGGGGGKRVYEYYLVSTASTKTPAGPGPTG

SEQ ID NO: 908 - protein, 29 aa, Artificial Sequence
  Cyclic GFR-binding peptide
AAAAKRVIEYYLVSTASLATPAGGGWFWW

SEQ ID NO: 909 - protein, 29 aa, Artificial Sequence
  Cyclic GFR-binding peptide
GGGGKENEDYYLVSTASLDTPAGGPGPTG

SEQ ID NO: 910 - protein, 32 aa, Artificial Sequence
  Cyclic GFR-binding peptide
GGGGGGNKNEDYYLVSTASLETPVGGGGWFWW

SEQ ID NO: 911 - protein, 30 aa, Artificial Sequence
  Cyclic GFR-binding peptide
AAAAKDYEDYYLVSTASMKEPVGGGPGPTG

SEQ ID NO: 912 - protein, 29 aa, Artificial Sequence
  Cyclic GFR-binding peptide
AAAAAANSSDDYYLVSTASLKTPVGWFWW

SEQ ID NO: 913 - protein, 27 aa, Artificial Sequence
  Cyclic GFR-binding peptide
GGGGNSSDDYYLVSTASMKTPTPGPTG

SEQ ID NO: 914 - protein, 30 aa, Artificial Sequence
  Cyclic GFR-binding peptide
GGGGGGNSSDDYYLVSTASLRAPVGGWFWW

SEQ ID NO: 915 - protein, 28 aa, Artificial Sequence
  Cyclic GFR-binding peptide
AAAANNSSDYYLVSTASLRTPVGPGPTG

SEQ ID NO: 916 - protein, 31 aa, Artificial Sequence
  Cyclic GFR-binding peptide
AAAAAAVGMDDYYLVSTASTKVPAGGGWFWW

SEQ ID NO: 917 - protein, 29 aa, Artificial Sequence
  Cyclic GFR-binding peptide
GGGGVVGKDYYLVSTASLAQPVGGPGPTG

SEQ ID NO: 918 - protein, 32 aa, Artificial Sequence
  Cyclic GFR-binding peptide
GGGGGGQQKDNYYLVSTASLDQSVGGGGWFWW

SEQ ID NO: 919 - protein, 30 aa, Artificial Sequence
  Cyclic GFR-binding peptide
AAAANNAADYYLVSTASLDQPVGGGPGPTG

SEQ ID NO: 920 - protein, 29 aa, Artificial Sequence
  Cyclic GFR-binding peptide
AAAAAANNASDYYLVSTASEETPVGWFWW

SEQ ID NO: 921 - protein, 27 aa, Artificial Sequence
  Cyclic GFR-binding peptide
GGGGNSSDDYYLVSTASQGTPVPGPTG

SEQ ID NO: 922 - protein, 30 aa, Artificial Sequence
  Cyclic GFR-binding peptide
GGGGGGVRGNDYYLVSTASHHVRSGGWFWW

SEQ ID NO: 923 - protein, 28 aa, Artificial Sequence
  Cyclic GFR-binding peptide
AAAAPKRGVYYLVSTASLQVQTGPGPTG

SEQ ID NO: 924 - protein, 31 aa, Artificial Sequence
  Cyclic GFR-binding peptide
AAAAAAPTKGIKYLVSIPSLETPVGGGWFWW

SEQ ID NO: 925 - protein, 29 aa, Artificial Sequence
  Cyclic GFR-binding peptide
GGGGPTRGVKYLVSIPSMKTPVGGPGPTG

SEQ ID NO: 926 - protein, 32 aa, Artificial Sequence
  Cyclic GFR-binding peptide
GGGGGGHPKIRKYLVSIPSLKTPVGGGGWFWW

SEQ ID NO: 927 - protein, 30 aa, Artificial Sequence
  Cyclic GFR-binding peptide
AAAAHPKIRKYLVSIPSLQTPVGGGPGPTG

SEQ ID NO: 928 - protein, 29 aa, Artificial Sequence
  Cyclic GFR-binding peptide
AAAAAAHPKIRKYLVSIPSLRTPVGWFWW

SEQ ID NO: 929 - protein, 27 aa, Artificial Sequence
  Cyclic GFR-binding peptide
GGGGHPKIRKYLVSIPSTKTPVPGPTG

SEQ ID NO: 930 - protein, 30 aa, Artificial Sequence
  Cyclic GFR-binding peptide
GGGGGGKRVYEKYLVSIPSLATPVGGWFWW

SEQ ID NO: 931 - protein, 28 aa, Artificial Sequence
  Cyclic GFR-binding peptide
AAAAKRVIEKYLVSIPSLDTPVGPGPTG

SEQ ID NO: 932 - protein, 29 aa, Artificial Sequence
  Cyclic GFR-binding peptide
GGGGKENEDKYLVSIPSMKEPVGGGWFWW

SEQ ID NO: 933 - protein, 31 aa, Artificial Sequence
  Cyclic GFR-binding peptide
GGGGGGNKNEDKYLVSIPSLKTPAGGPGPTG

SEQ ID NO: 934 - protein, 30 aa, Artificial Sequence
  Cyclic GFR-binding peptide
AAAAKDYEDKYLVSIPSLQTPAGGGGWFWW

SEQ ID NO: 935 - protein, 32 aa, Artificial Sequence
  Cyclic GFR-binding peptide
AAAAAANSSDDKYLVSIPSMKTPTGGGPGPTG

SEQ ID NO: 936 - protein, 27 aa, Artificial Sequence
  Cyclic GFR-binding peptide
GGGGNSSDDKYLVSIPSLRAPVGWFWW

SEQ ID NO: 937 - protein, 29 aa, Artificial Sequence
  Cyclic GFR-binding peptide
GGGGGGNSSDDKYLVSIPSTKVPAPGPTG

SEQ ID NO: 938 - protein, 28 aa, Artificial Sequence
  Cyclic GFR-binding peptide
AAAANNSSDKYLVSIPSLAQPVGGWFWW

SEQ ID NO: 939 - protein, 30 aa, Artificial Sequence
  Cyclic GFR-binding peptide
AAAAAAVGMDDKYLVSIPSLDQSVGPGPTG

SEQ ID NO: 940 - protein, 29 aa, Artificial Sequence
  Cyclic GFR-binding peptide
GGGGVVGKDKYLVSIPSLDQPVGGGWFWW

SEQ ID NO: 941 - protein, 31 aa, Artificial Sequence
  Cyclic GFR-binding peptide
GGGGGGQQKDNKYLVSIPSHHVRSGGPGPTG

SEQ ID NO: 942 - protein, 30 aa, Artificial Sequence
  Cyclic GFR-binding peptide
AAAANNAADKYLVSIPSLQVQTGGGGWFWW

SEQ ID NO: 943 - protein, 32 aa, Artificial Sequence
  Cyclic GFR-binding peptide
AAAAAANNASDLYLISIPELETPVGGGPGPTG

SEQ ID NO: 944 - protein, 27 aa, Artificial Sequence
  Cyclic GFR-binding peptide
GGGGNSSDDLYLISIPEMKTPVGWFWW

SEQ ID NO: 945 - protein, 29 aa, Artificial Sequence
  Cyclic GFR-binding peptide
GGGGGGVRGNDLYLISIPELKTPVPGPTG

SEQ ID NO: 946 - protein, 28 aa, Artificial Sequence
  Cyclic GFR-binding peptide
AAAAPKRGVLYLISIPELQTPVGGWFWW

SEQ ID NO: 947 - protein, 30 aa, Artificial Sequence
  Cyclic GFR-binding peptide
AAAAAAPTKGILYLISIPELRTPVGPGPTG

SEQ ID NO: 948 - protein, 29 aa, Artificial Sequence
  Cyclic GFR-binding peptide
GGGGPTRGVLYLISIPETKTPVGGGWFWW

SEQ ID NO: 949 - protein, 31 aa, Artificial Sequence
  Cyclic GFR-binding peptide
GGGGGGHPKIRLYLISIPELATPVGGPGPTG

SEQ ID NO: 950 - protein, 30 aa, Artificial Sequence
  Cyclic GFR-binding peptide
AAAAHPKIRLYLISIPELDTPVGGGGWFWW

SEQ ID NO: 951 - protein, 32 aa, Artificial Sequence
  Cyclic GFR-binding peptide
AAAAAAHPKIRLYLISIPEMKEPVGGGPGPTG

SEQ ID NO: 952 - protein, 27 aa, Artificial Sequence
  Cyclic GFR-binding peptide
GGGGHPKIRLYLISIPELKTPAGWFWW

SEQ ID NO: 953 - protein, 29 aa, Artificial Sequence
  Cyclic GFR-binding peptide
GGGGGGKRVYELYLISIPELQTPAPGPTG

SEQ ID NO: 954 - protein, 28 aa, Artificial Sequence
  Cyclic GFR-binding peptide
AAAAKRVIELYLISIPEMKTPTGGWFWW

SEQ ID NO: 955 - protein, 28 aa, Artificial Sequence
  Cyclic GFR-binding peptide
GGGGKENEDLYLISIPELRAPVGPGPTG

SEQ ID NO: 956 - protein, 31 aa, Artificial Sequence
  Cyclic GFR-binding peptide
GGGGGGNKNEDLYLISIPETKVPAGGGWFWW

SEQ ID NO: 957 - protein, 29 aa, Artificial Sequence
  Cyclic GFR-binding peptide
AAAAKDYEDLYLISIPELAQPVGGPGPTG

SEQ ID NO: 958 - protein, 32 aa, Artificial Sequence
  Cyclic GFR-binding peptide
AAAAAANSSDDLYLISIPELDQSVGGGGWFWW

SEQ ID NO: 959 - protein, 30 aa, Artificial Sequence
  Cyclic GFR-binding peptide
GGGGNSSDDLYLISIPELDQPVGGGPGPTG

SEQ ID NO: 960 - protein, 29 aa, Artificial Sequence
  Cyclic GFR-binding peptide
GGGGGGNSSDDLYLISIPEHHVRSGWFWW

SEQ ID NO: 961 - protein, 27 aa, Artificial Sequence
  Cyclic GFR-binding peptide
AAAANNSSDLYLISIPELQVQTPGPTG

SEQ ID NO: 962 - protein, 30 aa, Artificial Sequence
  Cyclic GFR-binding peptide
AAAAAAVGMDDFYLMNIPSLETPTGGWFWW

SEQ ID NO: 963 - protein, 28 aa, Artificial Sequence
  Cyclic GFR-binding peptide
GGGGVVGKDFYLMNIPSMKTPTGPGPTG

SEQ ID NO: 964 - protein, 31 aa, Artificial Sequence
  Cyclic GFR-binding peptide
GGGGGGQQKDNFYLMNIPSLKTPTGGGWFWW

SEQ ID NO: 965 - protein, 29 aa, Artificial Sequence
  Cyclic GFR-binding peptide
AAAANNAADFYLMNIPSLQTPTGGPGPTG

SEQ ID NO: 966 - protein, 32 aa, Artificial Sequence
  Cyclic GFR-binding peptide
AAAAAANNASDFYLMNIPSLRTPTGGGGWFWW

SEQ ID NO: 967 - protein, 30 aa, Artificial Sequence
  Cyclic GFR-binding peptide
GGGGNSSDDFYLMNIPSTKTPTGGGPGPTG

SEQ ID NO: 968 - protein, 29 aa, Artificial Sequence
  Cyclic GFR-binding peptide
GGGGGGVRGNDFYLMNIPSLATPTGWFWW

SEQ ID NO: 969 - protein, 27 aa, Artificial Sequence
  Cyclic GFR-binding peptide
AAAAPKRGVFYLMNIPSLDTPTPGPTG

SEQ ID NO: 970 - protein, 30 aa, Artificial Sequence
  Cyclic GFR-binding peptide
AAAAAAPTKGIFYLMNIPSLETPVGGWFWW

SEQ ID NO: 971 - protein, 28 aa, Artificial Sequence
  Cyclic GFR-binding peptide
GGGGPTRGVFYLMNIPSMKEPVGPGPTG

SEQ ID NO: 972 - protein, 31 aa, Artificial Sequence
  Cyclic GFR-binding peptide
GGGGGGHPKIRFYLMNIPSLKTPAGGGWFWW

SEQ ID NO: 973 - protein, 29 aa, Artificial Sequence
  Cyclic GFR-binding peptide
AAAAHPKIRFYLMNIPSLQTPAGGPGPTG

SEQ ID NO: 974 - protein, 32 aa, Artificial Sequence
  Cyclic GFR-binding peptide
AAAAAAHPKIRFYLMNIPSLKTPVGGGGWFWW

SEQ ID NO: 975 - protein, 30 aa, Artificial Sequence
  Cyclic GFR-binding peptide
GGGGHPKIRFYLMNIPSLRAPVGGGPGPTG

SEQ ID NO: 976 - protein, 29 aa, Artificial Sequence
  Cyclic GFR-binding peptide
GGGGGGKRVYEFYLMNIPSLRTPVGWFWW

SEQ ID NO: 977 - protein, 27 aa, Artificial Sequence
  Cyclic GFR-binding peptide
AAAAKRVIEFYLMNIPSTKVPAPGPTG

SEQ ID NO: 978 - protein, 28 aa, Artificial Sequence
  Cyclic GFR-binding peptide
GGGGKENEDFYLMNIPSLAQPVGGWFWW

SEQ ID NO: 979 - protein, 30 aa, Artificial Sequence
  Cyclic GFR-binding peptide
GGGGGGNKNEDFYLMNIPSLDQSVGPGPTG

SEQ ID NO: 980 - protein, 29 aa, Artificial Sequence
  Cyclic GFR-binding peptide
AAAAKDYEDFYLMNIPSLDQPVGGGWFWW

SEQ ID NO: 981 - protein, 31 aa, Artificial Sequence
  Cyclic GFR-binding peptide
AAAAAANSSDDFYLMNIPSEETPVGGPGPTG

SEQ ID NO: 982 - protein, 30 aa, Artificial Sequence
  Cyclic GFR-binding peptide
GGGGNSSDDFYLMNIPSQGTPVGGGGWFWW

SEQ ID NO: 983 - protein, 32 aa, Artificial Sequence
  Cyclic GFR-binding peptide
GGGGGGNSSDDFYLMNIPSHHVRSGGGPGPTG

SEQ ID NO: 984 - protein, 27 aa, Artificial Sequence
  Cyclic GFR-binding peptide
AAAANNSSDFYLMNIPSLQVQTGWFWW

SEQ ID NO: 985 - protein, 29 aa, Artificial Sequence
  Cyclic GFR-binding peptide
AAAAAAVGMDDIYLISIPSLEAPVPGPTG

SEQ ID NO: 986 - protein, 28 aa, Artificial Sequence
  Cyclic GFR-binding peptide
GGGGVVGKDIYLISIPSMKAPVGGWFWW

SEQ ID NO: 987 - protein, 30 aa, Artificial Sequence
  Cyclic GFR-binding peptide
GGGGGGQQKDNIYLISIPSLKAPVGPGPTG

SEQ ID NO: 988 - protein, 29 aa, Artificial Sequence
  Cyclic GFR-binding peptide
AAAANNAADIYLISIPSLQAPVGGGWFWW

SEQ ID NO: 989 - protein, 31 aa, Artificial Sequence
  Cyclic GFR-binding peptide
AAAAAANNASDIYLISIPSLRAPVGGPGPTG

SEQ ID NO: 990 - protein, 30 aa, Artificial Sequence
  Cyclic GFR-binding peptide
GGGGNSSDDIYLISIPSTKAPVGGGGWFWW

SEQ ID NO: 991 - protein, 32 aa, Artificial Sequence
  Cyclic GFR-binding peptide
GGGGGGVRGNDIYLISIPSLAAPVGGGPGPTG

SEQ ID NO: 992 - protein, 27 aa, Artificial Sequence
  Cyclic GFR-binding peptide
AAAAPKRGVIYLISIPSLDAPVGWFWW

SEQ ID NO: 993 - protein, 29 aa, Artificial Sequence
  Cyclic GFR-binding peptide
AAAAAAPTKGIIYLISIPSLETPVPGPTG

SEQ ID NO: 994 - protein, 28 aa, Artificial Sequence
  Cyclic GFR-binding peptide
GGGGPTRGVIYLISIPSMKEPVGGWFWW

SEQ ID NO: 995 - protein, 30 aa, Artificial Sequence
  Cyclic GFR-binding peptide
GGGGGGHPKIRIYLISIPSLKTPAGPGPTG

SEQ ID NO: 996 - protein, 29 aa, Artificial Sequence
  Cyclic GFR-binding peptide
AAAAHPKIRIYLISIPSLQTPAGGGWFWW

SEQ ID NO: 997 - protein, 31 aa, Artificial Sequence
  Cyclic GFR-binding peptide
AAAAAAHPKIRIYLISIPSLKTPVGGPGPTG

SEQ ID NO: 998 - protein, 30 aa, Artificial Sequence
  Cyclic GFR-binding peptide
GGGGHPKIRIYLISIPSMKTPTGGGGWFWW

SEQ ID NO: 999 - protein, 32 aa, Artificial Sequence
  Cyclic GFR-binding peptide
GGGGGGKRVYEIYLISIPSLRTPVGGGPGPTG

SEQ ID NO: 1000 - protein, 27 aa, Artificial Sequence
  Cyclic GFR-binding peptide
AAAAKRVIEIYLISIPSTKVPAGWFWW

SEQ ID NO: 1001 - protein, 27 aa, Artificial Sequence
  Cyclic GFR-binding peptide
GGGGKENEDIYLISIPSLAQPVPGPTG

SEQ ID NO: 1002 - protein, 30 aa, Artificial Sequence
  Cyclic GFR-binding peptide
GGGGGGNKNEDIYLISIPSLDQSVGGWFWW

SEQ ID NO: 1003 - protein, 28 aa, Artificial Sequence
  Cyclic GFR-binding peptide
AAAAKDYEDIYLISIPSLDQPVGPGPTG

SEQ ID NO: 1004 - protein, 31 aa, Artificial Sequence
  Cyclic GFR-binding peptide
AAAAAANSSDDIYLISIPSEETPVGGGWFWW

SEQ ID NO: 1005 - protein, 29 aa, Artificial Sequence
  Cyclic GFR-binding peptide
GGGGNSSDDIYLISIPSQGTPVGGPGPTG

SEQ ID NO: 1006 - protein, 32 aa, Artificial Sequence
  Cyclic GFR-binding peptide
GGGGGGNSSDDIYLISIPSHHVRSGGGGWFWW

SEQ ID NO: 1007 - protein, 30 aa, Artificial Sequence
  Cyclic GFR-binding peptide
AAAANNSSDIYLISIPSLQVQTGGGPGPTG

SEQ ID NO: 1008 - protein, 29 aa, Artificial Sequence
  Cyclic GFR-binding peptide
AAAAAAVGMDDIFLISIPSLETPVGWFWW

SEQ ID NO: 1009 - protein, 27 aa, Artificial Sequence
  Cyclic GFR-binding peptide
GGGGVVGKDIFLISIPSMKTPVPGPTG

SEQ ID NO: 1010 - protein, 30 aa, Artificial Sequence
  Cyclic GFR-binding peptide
GGGGGGQQKDNIFLISIPSLKTPVGGWFWW

SEQ ID NO: 1011 - protein, 28 aa, Artificial Sequence
  Cyclic GFR-binding peptide
AAAANNAADIFLISIPSLQTPVGPGPTG

SEQ ID NO: 1012 - protein, 31 aa, Artificial Sequence
  Cyclic GFR-binding peptide
AAAAAANNASDIFLISIPSLRTPVGGGWFWW

SEQ ID NO: 1013 - protein, 29 aa, Artificial Sequence
  Cyclic GFR-binding peptide
GGGGNSSDDIFLISIPSTKTPVGGPGPTG

SEQ ID NO: 1014 - protein, 32 aa, Artificial Sequence
  Cyclic GFR-binding peptide
GGGGGGVRGNDIFLISIPSLATPVGGGGWFWW

SEQ ID NO: 1015 - protein, 30 aa, Artificial Sequence
  Cyclic GFR-binding peptide
AAAAPKRGVIFLISIPSLDTPVGGGPGPTG

SEQ ID NO: 1016 - protein, 29 aa, Artificial Sequence
  Cyclic GFR-binding peptide
AAAAAAPTKGIIFLISIPSMKEPVGWFWW

SEQ ID NO: 1017 - protein, 27 aa, Artificial Sequence
  Cyclic GFR-binding peptide
GGGGPTRGVIFLISIPSLKTPAPGPTG

SEQ ID NO: 1018 - protein, 30 aa, Artificial Sequence
  Cyclic GFR-binding peptide
GGGGGGHPKIRIFLISIPSLQTPAGGWFWW

SEQ ID NO: 1019 - protein, 28 aa, Artificial Sequence
  Cyclic GFR-binding peptide
AAAAHPKIRIFLISIPSMKTPTGPGPTG

SEQ ID NO: 1020 - protein, 31 aa, Artificial Sequence
  Cyclic GFR-binding peptide
AAAAAAHPKIRIFLISIPSLRAPVGGGWFWW

SEQ ID NO: 1021 - protein, 29 aa, Artificial Sequence
  Cyclic GFR-binding peptide
GGGGHPKIRIFLISIPSTKVPAGGPGPTG

SEQ ID NO: 1022 - protein, 32 aa, Artificial Sequence
  Cyclic GFR-binding peptide
GGGGGGKRVYEIFLISIPSLAQPVGGGGWFWW

SEQ ID NO: 1023 - protein, 30 aa, Artificial Sequence
  Cyclic GFR-binding peptide
AAAAKRVIEIFLISIPSLDQSVGGGPGPTG

SEQ ID NO: 1024 - protein, 27 aa, Artificial Sequence
  Cyclic GFR-binding peptide
GGGGKENEDIFLISIPSLDQPVGWFWW

SEQ ID NO: 1025 - protein, 29 aa, Artificial Sequence
  Cyclic GFR-binding peptide
GGGGGGNKNEDIFLISIPSHHVRSPGPTG

SEQ ID NO: 1026 - protein, 28 aa, Artificial Sequence
  Cyclic GFR-binding peptide
AAAAKDYEDIFLISIPSLQVQTGGWFWW

SEQ ID NO: 1027 - protein, 30 aa, Artificial Sequence
  Cyclic GFR-binding peptide
AAAAAANSSDDVYLMSLPKLEVPAGPGPTG

SEQ ID NO: 1028 - protein, 29 aa, Artificial Sequence
  Cyclic GFR-binding peptide
GGGGNSSDDVYLMSLPKMKVPAGGGWFWW

SEQ ID NO: 1029 - protein, 31 aa, Artificial Sequence
  Cyclic GFR-binding peptide
GGGGGGNSSDDVYLMSLPKLKVPAGGPGPTG

SEQ ID NO: 1030 - protein, 30 aa, Artificial Sequence
  Cyclic GFR-binding peptide
AAAANNSSDVYLMSLPKLQVPAGGGGWFWW

SEQ ID NO: 1031 - protein, 32 aa, Artificial Sequence
  Cyclic GFR-binding peptide
AAAAAAVGMDDVYLMSLPKLRVPAGGGPGPTG

SEQ ID NO: 1032 - protein, 27 aa, Artificial Sequence
  Cyclic GFR-binding peptide
GGGGVVGKDVYLMSLPKLAVPAGWFWW

SEQ ID NO: 1033 - protein, 29 aa, Artificial Sequence
  Cyclic GFR-binding peptide
GGGGGGQQKDNVYLMSLPKLDVPAPGPTG

SEQ ID NO: 1034 - protein, 28 aa, Artificial Sequence
  Cyclic GFR-binding peptide
AAAANNAADVYLMSLPKLETPVGGWFWW

SEQ ID NO: 1035 - protein, 30 aa, Artificial Sequence
  Cyclic GFR-binding peptide
AAAAAANNASDVYLMSLPKMKEPVGPGPTG

SEQ ID NO: 1036 - protein, 29 aa, Artificial Sequence
  Cyclic GFR-binding peptide
GGGGNSSDDVYLMSLPKLKTPAGGGWFWW

SEQ ID NO: 1037 - protein, 31 aa, Artificial Sequence
  Cyclic GFR-binding peptide
GGGGGGVRGNDVYLMSLPKLQTPAGGPGPTG

SEQ ID NO: 1038 - protein, 30 aa, Artificial Sequence
  Cyclic GFR-binding peptide
AAAAPKRGVVYLMSLPKLKTPVGGGGWFWW

SEQ ID NO: 1039 - protein, 32 aa, Artificial Sequence
  Cyclic GFR-binding peptide
AAAAAAPTKGIVYLMSLPKMKTPTGGGPGPTG

SEQ ID NO: 1040 - protein, 27 aa, Artificial Sequence
  Cyclic GFR-binding peptide
GGGGPTRGVVYLMSLPKLRAPVGWFWW

SEQ ID NO: 1041 - protein, 29 aa, Artificial Sequence
  Cyclic GFR-binding peptide
GGGGGGHPKIRVYLMSLPKLRTPVPGPTG

SEQ ID NO: 1042 - protein, 28 aa, Artificial Sequence
  Cyclic GFR-binding peptide
AAAAHPKIRVYLMSLPKLAQPVGGWFWW

SEQ ID NO: 1043 - protein, 30 aa, Artificial Sequence
  Cyclic GFR-binding peptide
AAAAAAHPKIRVYLMSLPKLDQSVGPGPTG

SEQ ID NO: 1044 - protein, 29 aa, Artificial Sequence
  Cyclic GFR-binding peptide
GGGGHPKIRVYLMSLPKLDQPVGGGWFWW

SEQ ID NO: 1045 - protein, 31 aa, Artificial Sequence
  Cyclic GFR-binding peptide
GGGGGGKRVYEVYLMSLPKEETPVGGPGPTG

SEQ ID NO: 1046 - protein, 30 aa, Artificial Sequence
  Cyclic GFR-binding peptide
AAAAKRVIEVYLMSLPKQGTPVGGGGWFWW

SEQ ID NO: 1047 - protein, 30 aa, Artificial Sequence
  Cyclic GFR-binding peptide
GGGGKENEDVYLMSLPKHHVRSGGGPGPTG

SEQ ID NO: 1048 - protein, 29 aa, Artificial Sequence
  Cyclic GFR-binding peptide
GGGGGGNKNEDVYLMSLPKLQVQTGWFWW

SEQ ID NO: 1049 - protein, 27 aa, Artificial Sequence
  Cyclic GFR-binding peptide
AAAAKDYEDYYVIPLPELEQPVPGPTG

SEQ ID NO: 1050 - protein, 30 aa, Artificial Sequence
  Cyclic GFR-binding peptide
AAAAAANSSDDYYVIPLPEMKQPVGGWFWW

SEQ ID NO: 1051 - protein, 28 aa, Artificial Sequence
  Cyclic GFR-binding peptide
GGGGNSSDDYYVIPLPELKQPVGPGPTG

SEQ ID NO: 1052 - protein, 31 aa, Artificial Sequence
  Cyclic GFR-binding peptide
GGGGGGNSSDDYYVIPLPELQQPVGGGWFWW

SEQ ID NO: 1053 - protein, 29 aa, Artificial Sequence
  Cyclic GFR-binding peptide
AAAANNSSDYYVIPLPELRQPVGGPGPTG

SEQ ID NO: 1054 - protein, 32 aa, Artificial Sequence
  Cyclic GFR-binding peptide
AAAAAAVGMDDYYVIPLPETKQPVGGGGWFWW

SEQ ID NO: 1055 - protein, 30 aa, Artificial Sequence
  Cyclic GFR-binding peptide
GGGGVVGKDYYVIPLPELDQPVGGGPGPTG

SEQ ID NO: 1056 - protein, 29 aa, Artificial Sequence
  Cyclic GFR-binding peptide
GGGGGGQQKDNYYVIPLPELETPVGWFWW

SEQ ID NO: 1057 - protein, 27 aa, Artificial Sequence
  Cyclic GFR-binding peptide
AAAANNAADYYVIPLPEMKEPVPGPTG

SEQ ID NO: 1058 - protein, 30 aa, Artificial Sequence
  Cyclic GFR-binding peptide
AAAAAANNASDYYVIPLPELKTPAGGWFWW

SEQ ID NO: 1059 - protein, 28 aa, Artificial Sequence
  Cyclic GFR-binding peptide
GGGGNSSDDYYVIPLPELQTPAGPGPTG

SEQ ID NO: 1060 - protein, 31 aa, Artificial Sequence
  Cyclic GFR-binding peptide
GGGGGGVRGNDYYVIPLPELKTPVGGGWFWW

SEQ ID NO: 1061 - protein, 29 aa, Artificial Sequence
  Cyclic GFR-binding peptide
AAAAPKRGVYYVIPLPEMKTPTGGPGPTG

SEQ ID NO: 1062 - protein, 32 aa, Artificial Sequence
  Cyclic GFR-binding peptide
AAAAAAPTKGIYYVIPLPELRAPVGGGGWFWW

SEQ ID NO: 1063 - protein, 30 aa, Artificial Sequence
  Cyclic GFR-binding peptide
GGGGPTRGVYYVIPLPELRTPVGGGPGPTG

SEQ ID NO: 1064 - protein, 29 aa, Artificial Sequence
  Cyclic GFR-binding peptide
GGGGGGHPKIRYYVIPLPETKVPAGWFWW

SEQ ID NO: 1065 - protein, 27 aa, Artificial Sequence
  Cyclic GFR-binding peptide
AAAAHPKIRYYVIPLPELDQSVPGPTG

SEQ ID NO: 1066 - protein, 30 aa, Artificial Sequence
  Cyclic GFR-binding peptide
AAAAAAHPKIRYYVIPLPEEETPVGGWFWW

SEQ ID NO: 1067 - protein, 28 aa, Artificial Sequence
  Cyclic GFR-binding peptide
GGGGHPKIRYYVIPLPEQGTPVGPGPTG

SEQ ID NO: 1068 - protein, 31 aa, Artificial Sequence
  Cyclic GFR-binding peptide
GGGGGGKRVYEYYVIPLPEHHVRSGGGWFWW

SEQ ID NO: 1069 - protein, 29 aa, Artificial Sequence
  Cyclic GFR-binding peptide
AAAAKRVIEYYVIPLPELQVQTGGPGPTG

SEQ ID NO: 1070 - protein, 30 aa, Artificial Sequence
  Cyclic GFR-binding peptide
GGGGKENEDYYLITLPELEQSVGGGGWFWW

SEQ ID NO: 1071 - protein, 32 aa, Artificial Sequence
  Cyclic GFR-binding peptide
GGGGGGNKNEDYYLITLPEMKQSVGGGPGPTG

SEQ ID NO: 1072 - protein, 27 aa, Artificial Sequence
  Cyclic GFR-binding peptide
AAAAKDYEDYYLITLPELKQSVGWFWW

SEQ ID NO: 1073 - protein, 29 aa, Artificial Sequence
  Cyclic GFR-binding peptide
AAAAAANSSDDYYLITLPELQQSVPGPTG

SEQ ID NO: 1074 - protein, 28 aa, Artificial Sequence
  Cyclic GFR-binding peptide
GGGGNSSDDYYLITLPELRQSVGGWFWW

SEQ ID NO: 1075 - protein, 30 aa, Artificial Sequence
  Cyclic GFR-binding peptide
GGGGGGNSSDDYYLITLPETKQSVGPGPTG

SEQ ID NO: 1076 - protein, 29 aa, Artificial Sequence
  Cyclic GFR-binding peptide
AAAANNSSDYYLITLPELAQSVGGGWFWW

SEQ ID NO: 1077 - protein, 31 aa, Artificial Sequence
  Cyclic GFR-binding peptide
AAAAAAVGMDDYYLITLPELDQSVGGPGPTG

SEQ ID NO: 1078 - protein, 30 aa, Artificial Sequence
  Cyclic GFR-binding peptide
GGGGVVGKDYYLITLPELETPVGGGGWFWW

SEQ ID NO: 1079 - protein, 32 aa, Artificial Sequence
  Cyclic GFR-binding peptide
GGGGGGQQKDNYYLITLPEMKEPVGGGPGPTG

SEQ ID NO: 1080 - protein, 27 aa, Artificial Sequence
  Cyclic GFR-binding peptide
AAAANNAADYYLITLPELKTPAGWFWW

SEQ ID NO: 1081 - protein, 29 aa, Artificial Sequence
  Cyclic GFR-binding peptide
AAAAAANNASDYYLITLPELQTPAPGPTG

SEQ ID NO: 1082 - protein, 28 aa, Artificial Sequence
  Cyclic GFR-binding peptide
GGGGNSSDDYYLITLPELKTPVGGWFWW

SEQ ID NO: 1083 - protein, 30 aa, Artificial Sequence
  Cyclic GFR-binding peptide
GGGGGGVRGNDYYLITLPEMKTPTGPGPTG

SEQ ID NO: 1084 - protein, 29 aa, Artificial Sequence
  Cyclic GFR-binding peptide
AAAAPKRGVYYLITLPELRAPVGGGWFWW

SEQ ID NO: 1085 - protein, 31 aa, Artificial Sequence
  Cyclic GFR-binding peptide
AAAAAAPTKGIYYLITLPELRTPVGGPGPTG

SEQ ID NO: 1086 - protein, 30 aa, Artificial Sequence
  Cyclic GFR-binding peptide
GGGGPTRGVYYLITLPETKVPAGGGGWFWW

SEQ ID NO: 1087 - protein, 32 aa, Artificial Sequence
  Cyclic GFR-binding peptide
GGGGGGHPKIRYYLITLPELAQPVGGGPGPTG

SEQ ID NO: 1088 - protein, 27 aa, Artificial Sequence
  Cyclic GFR-binding peptide
AAAAHPKIRYYLITLPEEETPVGWFWW

SEQ ID NO: 1089 - protein, 29 aa, Artificial Sequence
  Cyclic GFR-binding peptide
AAAAAAHPKIRYYLITLPEQGTPVPGPTG

SEQ ID NO: 1090 - protein, 28 aa, Artificial Sequence
  Cyclic GFR-binding peptide
GGGGHPKIRYYLITLPEHHVRSGGWFWW

SEQ ID NO: 1091 - protein, 30 aa, Artificial Sequence
  Cyclic GFR-binding peptide
GGGGGGKRVYEYYLITLPELQVQTGPGPTG

SEQ ID NO: 1092 - protein, 29 aa, Artificial Sequence
  Cyclic GFR-binding peptide
AAAAKRVIEYYLITLPELEQPVGGGWFWW

SEQ ID NO: 1093 - protein, 29 aa, Artificial Sequence
  Cyclic GFR-binding peptide
GGGGKENEDYYLITLPEMKQPVGGPGPTG

SEQ ID NO: 1094 - protein, 32 aa, Artificial Sequence
  Cyclic GFR-binding peptide
GGGGGGNKNEDYYLITLPELKQPVGGGGWFWW

SEQ ID NO: 1095 - protein, 30 aa, Artificial Sequence
  Cyclic GFR-binding peptide
AAAAKDYEDYYLITLPELQQPVGGGPGPTG

SEQ ID NO: 1096 - protein, 29 aa, Artificial Sequence
  Cyclic GFR-binding peptide
AAAAAANSSDDYYLITLPELRQPVGWFWW

SEQ ID NO: 1097 - protein, 27 aa, Artificial Sequence
  Cyclic GFR-binding peptide
GGGGNSSDDYYLITLPETKQPVPGPTG

SEQ ID NO: 1098 - protein, 30 aa, Artificial Sequence
  Cyclic GFR-binding peptide
GGGGGGNSSDDYYLITLPELDQPVGGWFWW

SEQ ID NO: 1099 - protein, 28 aa, Artificial Sequence
  Cyclic GFR-binding peptide
AAAANNSSDMIQMTINSQGTPVGPGPTG

SEQ ID NO: 1100 - protein, 31 aa, Artificial Sequence
  Cyclic GFR-binding peptide
AAAAAAVGMDDMIQMTINSMKEPVGGGWFWW

SEQ ID NO: 1101 - protein, 29 aa, Artificial Sequence
  Cyclic GFR-binding peptide
GGGGVVGKDMIQMTINSLKTPAGGPGPTG

SEQ ID NO: 1102 - protein, 32 aa, Artificial Sequence
  Cyclic GFR-binding peptide
GGGGGGQQKDNMIQMTINSLQTPAGGGGWFWW

SEQ ID NO: 1103 - protein, 30 aa, Artificial Sequence
  Cyclic GFR-binding peptide
AAAANNAADMIQMTINSMKTPTGGGPGPTG

SEQ ID NO: 1104 - protein, 29 aa, Artificial Sequence
  Cyclic GFR-binding peptide
AAAAAANNASDMIQMTINSLRAPVGWFWW

SEQ ID NO: 1105 - protein, 27 aa, Artificial Sequence
  Cyclic GFR-binding peptide
GGGGNSSDDMIQMTINSTKVPAPGPTG

SEQ ID NO: 1106 - protein, 30 aa, Artificial Sequence
  Cyclic GFR-binding peptide
GGGGGGVRGNDMIQMTINSLAQPVGGWFWW

SEQ ID NO: 1107 - protein, 28 aa, Artificial Sequence
  Cyclic GFR-binding peptide
AAAAPKRGVMIQMTINSLDQSVGPGPTG

SEQ ID NO: 1108 - protein, 31 aa, Artificial Sequence
  Cyclic GFR-binding peptide
AAAAAAPTKGIMIQMTINSLDQPVGGGWFWW

SEQ ID NO: 1109 - protein, 29 aa, Artificial Sequence
  Cyclic GFR-binding peptide
GGGGPTRGVMIQMTINSHHVRSGGPGPTG

SEQ ID NO: 1110 - protein, 32 aa, Artificial Sequence
  Cyclic GFR-binding peptide
GGGGGGHPKIRMIQMTINSLQVQTGGGGWFWW

SEQ ID NO: 1111 - protein, 30 aa, Artificial Sequence
  Cyclic GFR-binding peptide
AAAAHPKIRVKAVKVSRLQVRSGGGPGPTG

SEQ ID NO: 1112 - protein, 29 aa, Artificial Sequence
  Cyclic GFR-binding peptide
AAAAAAHPKIRVKAVKVSRLETPVGWFWW

SEQ ID NO: 1113 - protein, 27 aa, Artificial Sequence
  Cyclic GFR-binding peptide
GGGGHPKIRVKAVKVSRMKEPVPGPTG

SEQ ID NO: 1114 - protein, 30 aa, Artificial Sequence
  Cyclic GFR-binding peptide
GGGGGGKRVYEVKAVKVSRLKTPAGGWFWW

SEQ ID NO: 1115 - protein, 28 aa, Artificial Sequence
  Cyclic GFR-binding peptide
AAAAKRVIEVKAVKVSRLQTPAGPGPTG

SEQ ID NO: 1116 - protein, 29 aa, Artificial Sequence
  Cyclic GFR-binding peptide
GGGGKENEDVKAVKVSRLKTPVGGGWFWW

SEQ ID NO: 1117 - protein, 31 aa, Artificial Sequence
  Cyclic GFR-binding peptide
GGGGGGNKNEDVKAVKVSRMKTPTGGPGPTG

SEQ ID NO: 1118 - protein, 30 aa, Artificial Sequence
  Cyclic GFR-binding peptide
AAAAKDYEDVKAVKVSRLRAPVGGGGWFWW

SEQ ID NO: 1119 - protein, 32 aa, Artificial Sequence
  Cyclic GFR-binding peptide
AAAAAANSSDDVKAVKVSRLRTPVGGGPGPTG

SEQ ID NO: 1120 - protein, 27 aa, Artificial Sequence
  Cyclic GFR-binding peptide
GGGGNSSDDVKAVKVSRTKVPAGWFWW

SEQ ID NO: 1121 - protein, 29 aa, Artificial Sequence
  Cyclic GFR-binding peptide
GGGGGGNSSDDVKAVKVSRLAQPVPGPTG

SEQ ID NO: 1122 - protein, 28 aa, Artificial Sequence
  Cyclic GFR-binding peptide
AAAANNSSDVKAVKVSRLDQSVGGWFWW

SEQ ID NO: 1123 - protein, 30 aa, Artificial Sequence
  Cyclic GFR-binding peptide
AAAAAAVGMDDVKAVKVSRLDQPVGPGPTG

SEQ ID NO: 1124 - protein, 29 aa, Artificial Sequence
  Cyclic GFR-binding peptide
GGGGVVGKDVKAVKVSREETPVGGGWFWW

SEQ ID NO: 1125 - protein, 31 aa, Artificial Sequence
  Cyclic GFR-binding peptide
GGGGGGQQKDNVKAVKVSRQGTPVGGPGPTG

SEQ ID NO: 1126 - protein, 30 aa, Artificial Sequence
  Cyclic GFR-binding peptide
AAAANNAADVKAVKVSRLQVQTGGGGWFWW

SEQ ID NO: 1127 - protein, 32 aa, Artificial Sequence
  Cyclic GFR-binding peptide
AAAAAANNASDIKRVQVPRHHVQTGGGPGPTG

SEQ ID NO: 1128 - protein, 27 aa, Artificial Sequence
  Cyclic GFR-binding peptide
GGGGNSSDDIKRVQVPRLETPVGWFWW

SEQ ID NO: 1129 - protein, 29 aa, Artificial Sequence
  Cyclic GFR-binding peptide
GGGGGGVRGNDIKRVQVPRMKEPVPGPTG

SEQ ID NO: 1130 - protein, 28 aa, Artificial Sequence
  Cyclic GFR-binding peptide
AAAAPKRGVIKRVQVPRLKTPAGGWFWW

SEQ ID NO: 1131 - protein, 30 aa, Artificial Sequence
  Cyclic GFR-binding peptide
AAAAAAPTKGIIKRVQVPRLQTPAGPGPTG

SEQ ID NO: 1132 - protein, 29 aa, Artificial Sequence
  Cyclic GFR-binding peptide
GGGGPTRGVIKRVQVPRLKTPVGGGWFWW

SEQ ID NO: 1133 - protein, 31 aa, Artificial Sequence
  Cyclic GFR-binding peptide
GGGGGGHPKIRIKRVQVPRMKTPTGGPGPTG

SEQ ID NO: 1134 - protein, 30 aa, Artificial Sequence
  Cyclic GFR-binding peptide
AAAAHPKIRIKRVQVPRLRAPVGGGGWFWW

SEQ ID NO: 1135 - protein, 32 aa, Artificial Sequence
  Cyclic GFR-binding peptide
AAAAAAHPKIRIKRVQVPRLRTPVGGGPGPTG

SEQ ID NO: 1136 - protein, 27 aa, Artificial Sequence
  Cyclic GFR-binding peptide
GGGGHPKIRIKRVQVPRTKVPAGWFWW

SEQ ID NO: 1137 - protein, 29 aa, Artificial Sequence
  Cyclic GFR-binding peptide
GGGGGGKRVYEIKRVQVPRLAQPVPGPTG

SEQ ID NO: 1138 - protein, 28 aa, Artificial Sequence
  Cyclic GFR-binding peptide
AAAAKRVIEIKRVQVPRLDQSVGGWFWW

SEQ ID NO: 1139 - protein, 28 aa, Artificial Sequence
  Cyclic GFR-binding peptide
GGGGKENEDIKRVQVPRLDQPVGPGPTG

SEQ ID NO: 1140 - protein, 31 aa, Artificial Sequence
  Cyclic GFR-binding peptide
GGGGGGNKNEDIKRVQVPREETPVGGGWFWW

SEQ ID NO: 1141 - protein, 29 aa, Artificial Sequence
  Cyclic GFR-binding peptide
AAAAKDYEDIKRVQVPRQGTPVGGPGPTG

SEQ ID NO: 1142 - protein, 32 aa, Artificial Sequence
  Cyclic GFR-binding peptide
AAAAAANSSDDIKRVQVPRHHVRSGGGGWFWW

SEQ ID NO: 1143 - protein, 27 aa, Artificial Sequence
  Cyclic GFR-binding peptide
GGGGVVKENEDLYLISIASGGGPGPTG

SEQ ID NO: 1144 - protein, 26 aa, Artificial Sequence
  Cyclic GFR-binding peptide
GGGGGGVVNKNEDLYLVSIASGWFWW

SEQ ID NO: 1145 - protein, 24 aa, Artificial Sequence
  Cyclic GFR-binding peptide
AAAAVVKDYEDFFLMSLSSPGPTG

SEQ ID NO: 1146 - protein, 27 aa, Artificial Sequence
  Cyclic GFR-binding peptide
AAAAAAIVNSSDDFFLVSLSSGGWFWW

SEQ ID NO: 1147 - protein, 25 aa, Artificial Sequence
  Cyclic GFR-binding peptide
GGGGIVNSSDDFYLMSIANGPGPTG

SEQ ID NO: 1148 - protein, 28 aa, Artificial Sequence
  Cyclic GFR-binding peptide
GGGGGGIVNSSDDFYLISIANGGGWFWW

SEQ ID NO: 1149 - protein, 26 aa, Artificial Sequence
  Cyclic GFR-binding peptide
AAAAIVNNSSDYYLMSTASGGPGPTG

SEQ ID NO: 1150 - protein, 29 aa, Artificial Sequence
  Cyclic GFR-binding peptide
AAAAAATPVGMDDYYLISTASGGGGWFWW

SEQ ID NO: 1151 - protein, 27 aa, Artificial Sequence
  Cyclic GFR-binding peptide
GGGGYTVVGKDKYLMSIPSGGGPGPTG

SEQ ID NO: 1152 - protein, 26 aa, Artificial Sequence
  Cyclic GFR-binding peptide
GGGGGGIIQQKDNKYLISIPSGWFWW

SEQ ID NO: 1153 - protein, 24 aa, Artificial Sequence
  Cyclic GFR-binding peptide
AAAAVVNNAADLYLMSIPEPGPTG

SEQ ID NO: 1154 - protein, 27 aa, Artificial Sequence
  Cyclic GFR-binding peptide
AAAAAAVVNNASDLYLVSIPEGGWFWW

SEQ ID NO: 1155 - protein, 25 aa, Artificial Sequence
  Cyclic GFR-binding peptide
GGGGIVNSSDDFYLINIPSGPGPTG

SEQ ID NO: 1156 - protein, 28 aa, Artificial Sequence
  Cyclic GFR-binding peptide
GGGGGGLLVRGNDFYLVNIPSGGGWFWW

SEQ ID NO: 1157 - protein, 26 aa, Artificial Sequence
  Cyclic GFR-binding peptide
AAAAVKPKRGVIYLMSIPSGGPGPTG

SEQ ID NO: 1158 - protein, 29 aa, Artificial Sequence
  Cyclic GFR-binding peptide
AAAAAAIKPTKGIIYLVSIPSGGGGWFWW

SEQ ID NO: 1159 - protein, 27 aa, Artificial Sequence
  Cyclic GFR-binding peptide
GGGGVKPTRGVIFLMSIPSGGGPGPTG

SEQ ID NO: 1160 - protein, 28 aa, Artificial Sequence
  Cyclic GFR-binding peptide
GGGGGGHQGQHPKIRIFLVSIPSGWFWW

SEQ ID NO: 1161 - protein, 26 aa, Artificial Sequence
  Cyclic GFR-binding peptide
AAAAHQGQHPKIRVYLISLPKPGPTG

SEQ ID NO: 1162 - protein, 29 aa, Artificial Sequence
  Cyclic GFR-binding peptide
AAAAAAHQGQHPKIRVYLVSLPKGGWFWW

SEQ ID NO: 1163 - protein, 27 aa, Artificial Sequence
  Cyclic GFR-binding peptide
GGGGHQGQHPKIRYYVMPLPEGPGPTG

SEQ ID NO: 1164 - protein, 30 aa, Artificial Sequence
  Cyclic GFR-binding peptide
GGGGGGLKPKKRVYEYYVVPLPEGGGWFWW

SEQ ID NO: 1165 - protein, 28 aa, Artificial Sequence
  Cyclic GFR-binding peptide
AAAAFIPKKRVIEYYLMTLPEGGPGPTG

SEQ ID NO: 1166 - protein, 29 aa, Artificial Sequence
  Cyclic GFR-binding peptide
AAAAAAVVKENEDYYLVTLPEGGGGWFWW

SEQ ID NO: 1167 - protein, 27 aa, Artificial Sequence
  Cyclic GFR-binding peptide
GGGGVVNKNEDMIQITINSGGGPGPTG

SEQ ID NO: 1168 - protein, 26 aa, Artificial Sequence
  Cyclic GFR-binding peptide
GGGGGGVVKDYEDMIQVTINSGWFWW

SEQ ID NO: 1169 - protein, 24 aa, Artificial Sequence
  Cyclic GFR-binding peptide
AAAAIVNSSDDVKAMKVSRPGPTG

SEQ ID NO: 1170 - protein, 27 aa, Artificial Sequence
  Cyclic GFR-binding peptide
AAAAAAIVNSSDDVKAIKVSRGGWFWW

SEQ ID NO: 1171 - protein, 25 aa, Artificial Sequence
  Cyclic GFR-binding peptide
GGGGIVNSSDDIKRMQVPRGPGPTG

SEQ ID NO: 1172 - protein, 28 aa, Artificial Sequence
  Cyclic GFR-binding peptide
GGGGGGIVNNSSDIKRIQVPRGGGWFWW

SEQ ID NO: 1173 - protein, 26 aa, Artificial Sequence
  Cyclic GFR-binding peptide
AAAATPVGMDDLYLMSIASGGPGPTG

SEQ ID NO: 1174 - protein, 29 aa, Artificial Sequence
  Cyclic GFR-binding peptide
AAAAAAYTVVGKDFFLISLSSGGGGWFWW

SEQ ID NO: 1175 - protein, 27 aa, Artificial Sequence
  Cyclic GFR-binding peptide
GGGGIIQQKDNFYLVSIANGGGPGPTG

SEQ ID NO: 1176 - protein, 26 aa, Artificial Sequence
  Cyclic GFR-binding peptide
GGGGGGVVNNAADYYLVSTASGWFWW

SEQ ID NO: 1177 - protein, 24 aa, Artificial Sequence
  Cyclic GFR-binding peptide
AAAAVVNNASDKYLVSIPSPGPTG

SEQ ID NO: 1178 - protein, 27 aa, Artificial Sequence
  Cyclic GFR-binding peptide
AAAAAAIVNSSDDLYLISIPEGGWFWW

SEQ ID NO: 1179 - protein, 25 aa, Artificial Sequence
  Cyclic GFR-binding peptide
GGGGLLVRGNDFYLMNIPSGPGPTG

SEQ ID NO: 1180 - protein, 28 aa, Artificial Sequence
  Cyclic GFR-binding peptide
GGGGGGVKPKRGVIYLISIPSGGGWFWW

SEQ ID NO: 1181 - protein, 26 aa, Artificial Sequence
  Cyclic GFR-binding peptide
AAAAIKPTKGIIFLISIPSGGPGPTG

SEQ ID NO: 1182 - protein, 29 aa, Artificial Sequence
  Cyclic GFR-binding peptide
AAAAAAVKPTRGVVYLMSLPKGGGGWFWW

SEQ ID NO: 1183 - protein, 29 aa, Artificial Sequence
  Cyclic GFR-binding peptide
GGGGHQGQHPKIRYYVIPLPEGGGPGPTG

SEQ ID NO: 1184 - protein, 28 aa, Artificial Sequence
  Cyclic GFR-binding peptide
GGGGGGHQGQHPKIRYYLITLPEGWFWW

SEQ ID NO: 1185 - protein, 26 aa, Artificial Sequence
  Cyclic GFR-binding peptide
AAAAHQGQHPKIRMIQMTINSPGPTG

SEQ ID NO: 1186 - protein, 29 aa, Artificial Sequence
  Cyclic GFR-binding peptide
AAAAAAHQGQHPKIRVKAVKVSRGGWFWW

SEQ ID NO: 1187 - protein, 27 aa, Artificial Sequence
  Cyclic GFR-binding peptide
GGGGLKPKKRVYEIKRVQVPRGPGPTG

SEQ ID NO: 1188 - protein, 20 aa, Artificial Sequence
  Cyclic GFR-binding peptide
GGGGLYLISIASGGGPGPTG

SEQ ID NO: 1189 - protein, 19 aa, Artificial Sequence
  Cyclic GFR-binding peptide
GGGGGGLYLVSIASGWFWW

SEQ ID NO: 1190 - protein, 17 aa, Artificial Sequence
  Cyclic GFR-binding peptide
AAAAFFLMSLSSPGPTG

SEQ ID NO: 1191 - protein, 20 aa, Artificial Sequence
  Cyclic GFR-binding peptide
AAAAAAFFLVSLSSGGWFWW

SEQ ID NO: 1192 - protein, 18 aa, Artificial Sequence
  Cyclic GFR-binding peptide
GGGGFYLMSIANGPGPTG

SEQ ID NO: 1193 - protein, 21 aa, Artificial Sequence
  Cyclic GFR-binding peptide
GGGGGGFYLISIANGGGWFWW

SEQ ID NO: 1194 - protein, 19 aa, Artificial Sequence
  Cyclic GFR-binding peptide
AAAAYYLMSTASGGPGPTG

SEQ ID NO: 1195 - protein, 22 aa, Artificial Sequence
  Cyclic GFR-binding peptide
AAAAAAYYLISTASGGGGWFWW

SEQ ID NO: 1196 - protein, 20 aa, Artificial Sequence
  Cyclic GFR-binding peptide
GGGGKYLMSIPSGGGPGPTG

SEQ ID NO: 1197 - protein, 19 aa, Artificial Sequence
  Cyclic GFR-binding peptide
GGGGGGKYLISIPSGWFWW

SEQ ID NO: 1198 - protein, 17 aa, Artificial Sequence
  Cyclic GFR-binding peptide
AAAALYLMSIPEPGPTG

SEQ ID NO: 1199 - protein, 20 aa, Artificial Sequence
  Cyclic GFR-binding peptide
AAAAAALYLVSIPEGGWFWW

SEQ ID NO: 1200 - protein, 18 aa, Artificial Sequence
  Cyclic GFR-binding peptide
GGGGFYLINIPSGPGPTG

SEQ ID NO: 1201 - protein, 21 aa, Artificial Sequence
  Cyclic GFR-binding peptide
GGGGGGFYLVNIPSGGGWFWW

SEQ ID NO: 1202 - protein, 19 aa, Artificial Sequence
  Cyclic GFR-binding peptide
AAAAIYLMSIPSGGPGPTG

SEQ ID NO: 1203 - protein, 22 aa, Artificial Sequence
  Cyclic GFR-binding peptide
AAAAAAIYLVSIPSGGGGWFWW

SEQ ID NO: 1204 - protein, 20 aa, Artificial Sequence
  Cyclic GFR-binding peptide
GGGGIFLMSIPSGGGPGPTG

SEQ ID NO: 1205 - protein, 19 aa, Artificial Sequence
  Cyclic GFR-binding peptide
GGGGGGIFLVSIPSGWFWW

SEQ ID NO: 1206 - protein, 17 aa, Artificial Sequence
  Cyclic GFR-binding peptide
AAAAVYLISLPKPGPTG

SEQ ID NO: 1207 - protein, 20 aa, Artificial Sequence
  Cyclic GFR-binding peptide
AAAAAAVYLVSLPKGGWFWW

SEQ ID NO: 1208 - protein, 18 aa, Artificial Sequence
  Cyclic GFR-binding peptide
GGGGYYVMPLPEGPGPTG

SEQ ID NO: 1209 - protein, 21 aa, Artificial Sequence
  Cyclic GFR-binding peptide
GGGGGGYYVVPLPEGGGWFWW

SEQ ID NO: 1210 - protein, 19 aa, Artificial Sequence
  Cyclic GFR-binding peptide
AAAAYYLMTLPEGGPGPTG

SEQ ID NO: 1211 - protein, 22 aa, Artificial Sequence
  Cyclic GFR-binding peptide
AAAAAAYYLVTLPEGGGGWFWW

SEQ ID NO: 1212 - protein, 20 aa, Artificial Sequence
  Cyclic GFR-binding peptide
GGGGMIQITINSGGGPGPTG

SEQ ID NO: 1213 - protein, 19 aa, Artificial Sequence
  Cyclic GFR-binding peptide
GGGGGGMIQVTINSGWFWW

SEQ ID NO: 1214 - protein, 17 aa, Artificial Sequence
  Cyclic GFR-binding peptide
AAAAVKAMKVSRPGPTG

SEQ ID NO: 1215 - protein, 20 aa, Artificial Sequence
  Cyclic GFR-binding peptide
AAAAAAVKAIKVSRGGWFWW

SEQ ID NO: 1216 - protein, 18 aa, Artificial Sequence
  Cyclic GFR-binding peptide
GGGGIKRMQVPRGPGPTG

SEQ ID NO: 1217 - protein, 21 aa, Artificial Sequence
  Cyclic GFR-binding peptide
GGGGGGIKRIQVPRGGGWFWW

SEQ ID NO: 1218 - protein, 19 aa, Artificial Sequence
  Cyclic GFR-binding peptide
AAAALYLMSIASGGPGPTG

SEQ ID NO: 1219 - protein, 22 aa, Artificial Sequence
  Cyclic GFR-binding peptide
AAAAAAFFLISLSSGGGGWFWW

SEQ ID NO: 1220 - protein, 20 aa, Artificial Sequence
  Cyclic GFR-binding peptide
GGGGFYLVSIANGGGPGPTG

SEQ ID NO: 1221 - protein, 19 aa, Artificial Sequence
  Cyclic GFR-binding peptide
GGGGGGYYLVSTASGWFWW

SEQ ID NO: 1222 - protein, 17 aa, Artificial Sequence
  Cyclic GFR-binding peptide
AAAAKYLVSIPSPGPTG

SEQ ID NO: 1223 - protein, 20 aa, Artificial Sequence
  Cyclic GFR-binding peptide
AAAAAALYLISIPEGGWFWW

SEQ ID NO: 1224 - protein, 18 aa, Artificial Sequence
  Cyclic GFR-binding peptide
GGGGFYLMNIPSGPGPTG

SEQ ID NO: 1225 - protein, 21 aa, Artificial Sequence
  Cyclic GFR-binding peptide
GGGGGGIYLISIPSGGGWFWW

SEQ ID NO: 1226 - protein, 19 aa, Artificial Sequence
  Cyclic GFR-binding peptide
AAAAIFLISIPSGGPGPTG

SEQ ID NO: 1227 - protein, 22 aa, Artificial Sequence
  Cyclic GFR-binding peptide
AAAAAAVYLMSLPKGGGGWFWW

SEQ ID NO: 1228 - protein, 20 aa, Artificial Sequence
  Cyclic GFR-binding peptide
GGGGYYVIPLPEGGGPGPTG

SEQ ID NO: 1229 - protein, 19 aa, Artificial Sequence
  Cyclic GFR-binding peptide
GGGGGGYYLITLPEGWFWW

SEQ ID NO: 1230 - protein, 17 aa, Artificial Sequence
  Cyclic GFR-binding peptide
AAAAMIQMTINSPGPTG

SEQ ID NO: 1231 - protein, 20 aa, Artificial Sequence
  Cyclic GFR-binding peptide
AAAAAAVKAVKVSRGGWFWW

SEQ ID NO: 1232 - protein, 18 aa, Artificial Sequence
  Cyclic GFR-binding peptide
GGGGIKRVQVPRGPGPTG

SEQ ID NO: 1233 - protein, 15 aa, Artificial Sequence
  Cyclic GFR-binding peptide
GGGGGGGLYLISIAS

SEQ ID NO: 1234 - protein, 16 aa, Artificial Sequence
  Cyclic GFR-binding peptide
GGGGGGGGLYLVSIAS

SEQ ID NO: 1235 - protein, 15 aa, Artificial Sequence
  Cyclic GFR-binding peptide
AAAAAAAFFLMSLSS

SEQ ID NO: 1236 - protein, 16 aa, Artificial Sequence
  Cyclic GFR-binding peptide
AAAAAAAAFFLVSLSS

SEQ ID NO: 1237 - protein, 15 aa, Artificial Sequence
  Cyclic GFR-binding peptide
GGGGGGGFYLMSIAN

SEQ ID NO: 1238 - protein, 16 aa, Artificial Sequence
  Cyclic GFR-binding peptide
GGGGGGGGFYLISIAN

SEQ ID NO: 1239 - protein, 15 aa, Artificial Sequence
  Cyclic GFR-binding peptide
AAAAAAAYYLMSTAS

SEQ ID NO: 1240 - protein, 16 aa, Artificial Sequence
  Cyclic GFR-binding peptide
AAAAAAAAYYLISTAS

SEQ ID NO: 1241 - protein, 15 aa, Artificial Sequence
  Cyclic GFR-binding peptide
GGGGGGGKYLMSIPS

SEQ ID NO: 1242 - protein, 16 aa, Artificial Sequence
  Cyclic GFR-binding peptide
GGGGGGGGKYLISIPS

SEQ ID NO: 1243 - protein, 15 aa, Artificial Sequence
  Cyclic GFR-binding peptide
AAAAAAALYLMSIPE

SEQ ID NO: 1244 - protein, 16 aa, Artificial Sequence
  Cyclic GFR-binding peptide
AAAAAAAALYLVSIPE

SEQ ID NO: 1245 - protein, 15 aa, Artificial Sequence
  Cyclic GFR-binding peptide
GGGGGGGFYLINIPS

SEQ ID NO: 1246 - protein, 16 aa, Artificial Sequence
  Cyclic GFR-binding peptide
GGGGGGGGFYLVNIPS

SEQ ID NO: 1247 - protein, 15 aa, Artificial Sequence
  Cyclic GFR-binding peptide
AAAAAAAIYLMSIPS

SEQ ID NO: 1248 - protein, 16 aa, Artificial Sequence
  Cyclic GFR-binding peptide
AAAAAAAAIYLVSIPS

SEQ ID NO: 1249 - protein, 15 aa, Artificial Sequence
  Cyclic GFR-binding peptide
GGGGGGGIFLMSIPS

SEQ ID NO: 1250 - protein, 16 aa, Artificial Sequence
  Cyclic GFR-binding peptide
GGGGGGGGIFLVSIPS

SEQ ID NO: 1251 - protein, 15 aa, Artificial Sequence
  Cyclic GFR-binding peptide
AAAAAAAVYLISLPK

SEQ ID NO: 1252 - protein, 16 aa, Artificial Sequence
  Cyclic GFR-binding peptide
AAAAAAAAVYLVSLPK

SEQ ID NO: 1253 - protein, 15 aa, Artificial Sequence
  Cyclic GFR-binding peptide
GGGGGGGYYVMPLPE

SEQ ID NO: 1254 - protein, 16 aa, Artificial Sequence
  Cyclic GFR-binding peptide
GGGGGGGGYYVVPLPE

SEQ ID NO: 1255 - protein, 15 aa, Artificial Sequence
  Cyclic GFR-binding peptide
AAAAAAAYYLMTLPE

SEQ ID NO: 1256 - protein, 16 aa, Artificial Sequence
  Cyclic GFR-binding peptide
AAAAAAAAYYLVTLPE

SEQ ID NO: 1257 - protein, 15 aa, Artificial Sequence
  Cyclic GFR-binding peptide
GGGGGGGMIQITINS

SEQ ID NO: 1258 - protein, 16 aa, Artificial Sequence
  Cyclic GFR-binding peptide
GGGGGGGGMIQVTINS

SEQ ID NO: 1259 - protein, 15 aa, Artificial Sequence
  Cyclic GFR-binding peptide
AAAAAAAVKAMKVSR

SEQ ID NO: 1260 - protein, 16 aa, Artificial Sequence
  Cyclic GFR-binding peptide
AAAAAAAAVKAIKVSR

SEQ ID NO: 1261 - protein, 15 aa, Artificial Sequence
  Cyclic GFR-binding peptide
GGGGGGGIKRMQVPR

SEQ ID NO: 1262 - protein, 16 aa, Artificial Sequence
  Cyclic GFR-binding peptide
GGGGGGGGIKRIQVPR

SEQ ID NO: 1263 - protein, 15 aa, Artificial Sequence
  Cyclic GFR-binding peptide
AAAAAAALYLMSIAS

SEQ ID NO: 1264 - protein, 16 aa, Artificial Sequence
  Cyclic GFR-binding peptide
AAAAAAAAFFLISLSS

SEQ ID NO: 1265 - protein, 15 aa, Artificial Sequence
  Cyclic GFR-binding peptide
GGGGGGGFYLVSIAN

SEQ ID NO: 1266 - protein, 16 aa, Artificial Sequence
  Cyclic GFR-binding peptide
GGGGGGGGYYLVSTAS

SEQ ID NO: 1267 - protein, 15 aa, Artificial Sequence
  Cyclic GFR-binding peptide
AAAAAAAKYLVSIPS

SEQ ID NO: 1268 - protein, 16 aa, Artificial Sequence
  Cyclic GFR-binding peptide
AAAAAAAALYLISIPE

SEQ ID NO: 1269 - protein, 15 aa, Artificial Sequence
  Cyclic GFR-binding peptide
GGGGGGGFYLMNIPS

SEQ ID NO: 1270 - protein, 16 aa, Artificial Sequence
  Cyclic GFR-binding peptide
GGGGGGGGIYLISIPS

SEQ ID NO: 1271 - protein, 15 aa, Artificial Sequence
  Cyclic GFR-binding peptide
AAAAAAAIFLISIPS

SEQ ID NO: 1272 - protein, 16 aa, Artificial Sequence
  Cyclic GFR-binding peptide
AAAAAAAAVYLMSLPK

SEQ ID NO: 1273 - protein, 15 aa, Artificial Sequence
  Cyclic GFR-binding peptide
GGGGGGGYYVIPLPE

SEQ ID NO: 1274 - protein, 16 aa, Artificial Sequence
  Cyclic GFR-binding peptide
GGGGGGGGYYLITLPE

SEQ ID NO: 1275 - protein, 15 aa, Artificial Sequence
  Cyclic GFR-binding peptide
AAAAAAAMIQMTINS

SEQ ID NO: 1276 - protein, 16 aa, Artificial Sequence
  Cyclic GFR-binding peptide
AAAAAAAAVKAVKVSR

SEQ ID NO: 1277 - protein, 15 aa, Artificial Sequence
  Cyclic GFR-binding peptide
GGGGGGGIKRVQVPR

SEQ ID NO: 1278 - protein, 27 aa, Artificial Sequence
  Cyclic GFR-binding peptide
GGGGKENEDLYLMSIASMKTPVHPKIR

SEQ ID NO: 1279 - protein, 29 aa, Artificial Sequence
  Cyclic GFR-binding peptide
GGGGGGNKNEDLYLMSIASLKTPVKRVYE

SEQ ID NO: 1280 - protein, 27 aa, Artificial Sequence
  Cyclic GFR-binding peptide
AAAAKDYEDLYLMSIASLQTPVKRVIE

SEQ ID NO: 1281 - protein, 29 aa, Artificial Sequence
  Cyclic GFR-binding peptide
AAAAAANSSDDLYLMSIASLRTPVKENED

SEQ ID NO: 1282 - protein, 27 aa, Artificial Sequence
  Cyclic GFR-binding peptide
GGGGNSSDDLYLMSIASTKTPVNKNED

SEQ ID NO: 1283 - protein, 29 aa, Artificial Sequence
  Cyclic GFR-binding peptide
GGGGGGNSSDDLYLMSIASLATPVKDYED

SEQ ID NO: 1284 - protein, 27 aa, Artificial Sequence
  Cyclic GFR-binding peptide
AAAANNSSDLYLMSIASLDTPVNSSDD

SEQ ID NO: 1285 - protein, 29 aa, Artificial Sequence
  Cyclic GFR-binding peptide
AAAAAAVGMDDLYLMSIASMKEPVNSSDD

SEQ ID NO: 1286 - protein, 27 aa, Artificial Sequence
  Cyclic GFR-binding peptide
GGGGVVGKDLYLMSIASLKTPANSSDD

SEQ ID NO: 1287 - protein, 29 aa, Artificial Sequence
  Cyclic GFR-binding peptide
GGGGGGQQKDNLYLMSIASLQTPANNSSD

SEQ ID NO: 1288 - protein, 27 aa, Artificial Sequence
  Cyclic GFR-binding peptide
AAAANNAADLYLMSIASMKTPTVGMDD

SEQ ID NO: 1289 - protein, 29 aa, Artificial Sequence
  Cyclic GFR-binding peptide
AAAAAANNASDLYLMSIASLRAPVVVGKD

SEQ ID NO: 1290 - protein, 27 aa, Artificial Sequence
  Cyclic GFR-binding peptide
GGGGNSSDDLYLMSIASTKVPAQQKDN

SEQ ID NO: 1291 - protein, 29 aa, Artificial Sequence
  Cyclic GFR-binding peptide
GGGGGGVRGNDLYLMSIASLAQPVNNAAD

SEQ ID NO: 1292 - protein, 27 aa, Artificial Sequence
  Cyclic GFR-binding peptide
AAAAPKRGVLYLMSIASLDQSVNNASD

SEQ ID NO: 1293 - protein, 29 aa, Artificial Sequence
  Cyclic GFR-binding peptide
AAAAAAPTKGILYLMSIASLDQPVNSSDD

SEQ ID NO: 1294 - protein, 27 aa, Artificial Sequence
  Cyclic GFR-binding peptide
GGGGPTRGVLYLMSIASHHVRSVRGND

SEQ ID NO: 1295 - protein, 29 aa, Artificial Sequence
  Cyclic GFR-binding peptide
GGGGGGHPKIRLYLMSIASLQVQTPKRGV

SEQ ID NO: 1296 - protein, 27 aa, Artificial Sequence
  Cyclic GFR-binding peptide
AAAAHPKIRFFLISLSSLEEPVPTKGI

SEQ ID NO: 1297 - protein, 29 aa, Artificial Sequence
  Cyclic GFR-binding peptide
AAAAAAHPKIRFFLISLSSLKEPVPTRGV

SEQ ID NO: 1298 - protein, 27 aa, Artificial Sequence
  Cyclic GFR-binding peptide
GGGGHPKIRFFLISLSSLQEPVHPKIR

SEQ ID NO: 1299 - protein, 29 aa, Artificial Sequence
  Cyclic GFR-binding peptide
GGGGGGKRVYEFFLISLSSMKEPVHPKIR

SEQ ID NO: 1300 - protein, 27 aa, Artificial Sequence
  Cyclic GFR-binding peptide
AAAAKRVIEFFLISLSSLREPVHPKIR

SEQ ID NO: 1301 - protein, 27 aa, Artificial Sequence
  Cyclic GFR-binding peptide
GGGGKENEDFFLISLSSTKEPVKENED

SEQ ID NO: 1302 - protein, 29 aa, Artificial Sequence
  Cyclic GFR-binding peptide
GGGGGGNKNEDFFLISLSSLAEPVNKNED

SEQ ID NO: 1303 - protein, 27 aa, Artificial Sequence
  Cyclic GFR-binding peptide
AAAAKDYEDFFLISLSSLDEPVKDYED

SEQ ID NO: 1304 - protein, 29 aa, Artificial Sequence
  Cyclic GFR-binding peptide
AAAAAANSSDDFFLISLSSLETPVNSSDD

SEQ ID NO: 1305 - protein, 27 aa, Artificial Sequence
  Cyclic GFR-binding peptide
GGGGNSSDDFFLISLSSLKTPANSSDD

SEQ ID NO: 1306 - protein, 29 aa, Artificial Sequence
  Cyclic GFR-binding peptide
GGGGGGNSSDDFFLISLSSLQTPANSSDD

SEQ ID NO: 1307 - protein, 27 aa, Artificial Sequence
  Cyclic GFR-binding peptide
AAAANNSSDFFLISLSSLKTPVNNSSD

SEQ ID NO: 1308 - protein, 29 aa, Artificial Sequence
  Cyclic GFR-binding peptide
AAAAAAVGMDDFFLISLSSMKTPTVGMDD

SEQ ID NO: 1309 - protein, 27 aa, Artificial Sequence
  Cyclic GFR-binding peptide
GGGGVVGKDFFLISLSSLRAPVVVGKD

SEQ ID NO: 1310 - protein, 29 aa, Artificial Sequence
  Cyclic GFR-binding peptide
GGGGGGQQKDNFFLISLSSLRTPVQQKDN

SEQ ID NO: 1311 - protein, 27 aa, Artificial Sequence
  Cyclic GFR-binding peptide
AAAANNAADFFLISLSSTKVPANNAAD

SEQ ID NO: 1312 - protein, 29 aa, Artificial Sequence
  Cyclic GFR-binding peptide
AAAAAANNASDFFLISLSSLAQPVNNASD

SEQ ID NO: 1313 - protein, 27 aa, Artificial Sequence
  Cyclic GFR-binding peptide
GGGGNSSDDFFLISLSSLDQSVNSSDD

SEQ ID NO: 1314 - protein, 29 aa, Artificial Sequence
  Cyclic GFR-binding peptide
GGGGGGVRGNDFFLISLSSLDQPVVRGND

SEQ ID NO: 1315 - protein, 27 aa, Artificial Sequence
  Cyclic GFR-binding peptide
AAAAPKRGVFFLISLSSEETPVPKRGV

SEQ ID NO: 1316 - protein, 29 aa, Artificial Sequence
  Cyclic GFR-binding peptide
AAAAAAPTKGIFFLISLSSQGTPVPTKGI

SEQ ID NO: 1317 - protein, 27 aa, Artificial Sequence
  Cyclic GFR-binding peptide
GGGGPTRGVFFLISLSSHHVRSPTRGV

SEQ ID NO: 1318 - protein, 29 aa, Artificial Sequence
  Cyclic GFR-binding peptide
GGGGGGHPKIRFFLISLSSLQVQTHPKIR

SEQ ID NO: 1319 - protein, 27 aa, Artificial Sequence
  Cyclic GFR-binding peptide
AAAAHPKIRFYLVSIANLETPAHPKIR

SEQ ID NO: 1320 - protein, 29 aa, Artificial Sequence
  Cyclic GFR-binding peptide
AAAAAAHPKIRFYLVSIANMKTPAHPKIR

SEQ ID NO: 1321 - protein, 27 aa, Artificial Sequence
  Cyclic GFR-binding peptide
GGGGHPKIRFYLVSIANLKTPAHPKIR

SEQ ID NO: 1322 - protein, 29 aa, Artificial Sequence
  Cyclic GFR-binding peptide
GGGGGGKRVYEFYLVSIANLRTPAKRVYE

SEQ ID NO: 1323 - protein, 27 aa, Artificial Sequence
  Cyclic GFR-binding peptide
AAAAKRVIEFYLVSIANTKTPAKRVIE

SEQ ID NO: 1324 - protein, 27 aa, Artificial Sequence
  Cyclic GFR-binding peptide
GGGGKENEDFYLVSIANLATPAKENED

SEQ ID NO: 1325 - protein, 29 aa, Artificial Sequence
  Cyclic GFR-binding peptide
GGGGGGNKNEDFYLVSIANLDTPANKNED

SEQ ID NO: 1326 - protein, 27 aa, Artificial Sequence
  Cyclic GFR-binding peptide
AAAAKDYEDFYLVSIANLETPVKDYED

SEQ ID NO: 1327 - protein, 29 aa, Artificial Sequence
  Cyclic GFR-binding peptide
AAAAAANSSDDFYLVSIANMKEPVNSSDD

SEQ ID NO: 1328 - protein, 27 aa, Artificial Sequence
  Cyclic GFR-binding peptide
GGGGNSSDDFYLVSIANLKTPVNSSDD

SEQ ID NO: 1329 - protein, 29 aa, Artificial Sequence
  Cyclic GFR-binding peptide
GGGGGGNSSDDFYLVSIANMKTPTNSSDD

SEQ ID NO: 1330 - protein, 27 aa, Artificial Sequence
  Cyclic GFR-binding peptide
AAAANNSSDFYLVSIANLRAPVNNSSD

SEQ ID NO: 1331 - protein, 29 aa, Artificial Sequence
  Cyclic GFR-binding peptide
AAAAAAVGMDDFYLVSIANLRTPVVGMDD

SEQ ID NO: 1332 - protein, 27 aa, Artificial Sequence
  Cyclic GFR-binding peptide
GGGGVVGKDFYLVSIANTKVPAVVGKD

SEQ ID NO: 1333 - protein, 29 aa, Artificial Sequence
  Cyclic GFR-binding peptide
GGGGGGQQKDNFYLVSIANLAQPVQQKDN

SEQ ID NO: 1334 - protein, 27 aa, Artificial Sequence
  Cyclic GFR-binding peptide
AAAANNAADFYLVSIANLDQSVNNAAD

SEQ ID NO: 1335 - protein, 29 aa, Artificial Sequence
  Cyclic GFR-binding peptide
AAAAAANNASDFYLVSIANLDQPVNNASD

SEQ ID NO: 1336 - protein, 27 aa, Artificial Sequence
  Cyclic GFR-binding peptide
GGGGNSSDDFYLVSIANEETPVNSSDD

SEQ ID NO: 1337 - protein, 29 aa, Artificial Sequence
  Cyclic GFR-binding peptide
GGGGGGVRGNDFYLVSIANQGTPVVRGND

SEQ ID NO: 1338 - protein, 27 aa, Artificial Sequence
  Cyclic GFR-binding peptide
AAAAPKRGVFYLVSIANHHVRSPKRGV

SEQ ID NO: 1339 - protein, 29 aa, Artificial Sequence
  Cyclic GFR-binding peptide
AAAAAAPTKGIFYLVSIANLQVQTPTKGI

SEQ ID NO: 1340 - protein, 27 aa, Artificial Sequence
  Cyclic GFR-binding peptide
GGGGPTRGVYYLVSTASLETPAPTRGV

SEQ ID NO: 1341 - protein, 29 aa, Artificial Sequence
  Cyclic GFR-binding peptide
GGGGGGHPKIRYYLVSTASMKTPAHPKIR

SEQ ID NO: 1342 - protein, 27 aa, Artificial Sequence
  Cyclic GFR-binding peptide
AAAAHPKIRYYLVSTASLKTPAHPKIR

SEQ ID NO: 1343 - protein, 29 aa, Artificial Sequence
  Cyclic GFR-binding peptide
AAAAAAHPKIRYYLVSTASLQTPAHPKIR

SEQ ID NO: 1344 - protein, 27 aa, Artificial Sequence
  Cyclic GFR-binding peptide
GGGGHPKIRYYLVSTASLRTPAHPKIR

SEQ ID NO: 1345 - protein, 29 aa, Artificial Sequence
  Cyclic GFR-binding peptide
GGGGGGKRVYEYYLVSTASTKTPAKRVYE

SEQ ID NO: 1346 - protein, 27 aa, Artificial Sequence
  Cyclic GFR-binding peptide
AAAAKRVIEYYLVSTASLATPAKRVIE

SEQ ID NO: 1347 - protein, 27 aa, Artificial Sequence
  Cyclic GFR-binding peptide
GGGGKENEDYYLVSTASLDTPAKENED

SEQ ID NO: 1348 - protein, 29 aa, Artificial Sequence
  Cyclic GFR-binding peptide
GGGGGGNKNEDYYLVSTASLETPVNKNED

SEQ ID NO: 1349 - protein, 27 aa, Artificial Sequence
  Cyclic GFR-binding peptide
AAAAKDYEDYYLVSTASMKEPVKDYED

SEQ ID NO: 1350 - protein, 29 aa, Artificial Sequence
  Cyclic GFR-binding peptide
AAAAAANSSDDYYLVSTASLKTPVNSSDD

SEQ ID NO: 1351 - protein, 27 aa, Artificial Sequence
  Cyclic GFR-binding peptide
GGGGNSSDDYYLVSTASMKTPTNSSDD

SEQ ID NO: 1352 - protein, 29 aa, Artificial Sequence
  Cyclic GFR-binding peptide
GGGGGGNSSDDYYLVSTASLRAPVNSSDD

SEQ ID NO: 1353 - protein, 27 aa, Artificial Sequence
  Cyclic GFR-binding peptide
AAAANNSSDYYLVSTASLRTPVNNSSD

SEQ ID NO: 1354 - protein, 29 aa, Artificial Sequence
  Cyclic GFR-binding peptide
AAAAAAVGMDDYYLVSTASTKVPAVGMDD

SEQ ID NO: 1355 - protein, 27 aa, Artificial Sequence
  Cyclic GFR-binding peptide
GGGGVVGKDYYLVSTASLAQPVVVGKD

SEQ ID NO: 1356 - protein, 29 aa, Artificial Sequence
  Cyclic GFR-binding peptide
GGGGGGQQKDNYYLVSTASLDQSVQQKDN

SEQ ID NO: 1357 - protein, 27 aa, Artificial Sequence
  Cyclic GFR-binding peptide
AAAANNAADYYLVSTASLDQPVNNAAD

SEQ ID NO: 1358 - protein, 29 aa, Artificial Sequence
  Cyclic GFR-binding peptide
AAAAAANNASDYYLVSTASEETPVNNASD

SEQ ID NO: 1359 - protein, 27 aa, Artificial Sequence
  Cyclic GFR-binding peptide
GGGGNSSDDYYLVSTASQGTPVNSSDD

SEQ ID NO: 1360 - protein, 29 aa, Artificial Sequence
  Cyclic GFR-binding peptide
GGGGGGVRGNDYYLVSTASHHVRSVRGND

SEQ ID NO: 1361 - protein, 27 aa, Artificial Sequence
  Cyclic GFR-binding peptide
AAAAPKRGVYYLVSTASLQVQTPKRGV

SEQ ID NO: 1362 - protein, 29 aa, Artificial Sequence
  Cyclic GFR-binding peptide
AAAAAAPTKGIKYLVSIPSLETPVPTKGI

SEQ ID NO: 1363 - protein, 27 aa, Artificial Sequence
  Cyclic GFR-binding peptide
GGGGPTRGVKYLVSIPSMKTPVPTRGV

SEQ ID NO: 1364 - protein, 29 aa, Artificial Sequence
  Cyclic GFR-binding peptide
GGGGGGHPKIRKYLVSIPSLKTPVHPKIR

SEQ ID NO: 1365 - protein, 27 aa, Artificial Sequence
  Cyclic GFR-binding peptide
AAAAHPKIRKYLVSIPSLQTPVHPKIR

SEQ ID NO: 1366 - protein, 29 aa, Artificial Sequence
  Cyclic GFR-binding peptide
AAAAAAHPKIRKYLVSIPSLRTPVHPKIR

SEQ ID NO: 1367 - protein, 27 aa, Artificial Sequence
  Cyclic GFR-binding peptide
GGGGHPKIRKYLVSIPSTKTPVHPKIR

SEQ ID NO: 1368 - protein, 29 aa, Artificial Sequence
  Cyclic GFR-binding peptide
GGGGGGKRVYEKYLVSIPSLATPVKRVYE

SEQ ID NO: 1369 - protein, 27 aa, Artificial Sequence
  Cyclic GFR-binding peptide
AAAAKRVIEKYLVSIPSLDTPVKRVIE

SEQ ID NO: 1370 - protein, 27 aa, Artificial Sequence
  Cyclic GFR-binding peptide
GGGGKENEDKYLVSIPSMKEPVKENED

SEQ ID NO: 1371 - protein, 29 aa, Artificial Sequence
  Cyclic GFR-binding peptide
GGGGGGNKNEDKYLVSIPSLKTPANKNED

SEQ ID NO: 1372 - protein, 27 aa, Artificial Sequence
  Cyclic GFR-binding peptide
AAAAKDYEDKYLVSIPSLQTPAKDYED

SEQ ID NO: 1373 - protein, 29 aa, Artificial Sequence
  Cyclic GFR-binding peptide
AAAAAANSSDDKYLVSIPSMKTPTNSSDD

SEQ ID NO: 1374 - protein, 27 aa, Artificial Sequence
  Cyclic GFR-binding peptide
GGGGNSSDDKYLVSIPSLRAPVNSSDD

SEQ ID NO: 1375 - protein, 29 aa, Artificial Sequence
  Cyclic GFR-binding peptide
GGGGGGNSSDDKYLVSIPSTKVPANSSDD

SEQ ID NO: 1376 - protein, 27 aa, Artificial Sequence
  Cyclic GFR-binding peptide
AAAANNSSDKYLVSIPSLAQPVNNSSD

SEQ ID NO: 1377 - protein, 29 aa, Artificial Sequence
  Cyclic GFR-binding peptide
AAAAAAVGMDDKYLVSIPSLDQSVVGMDD

SEQ ID NO: 1378 - protein, 27 aa, Artificial Sequence
  Cyclic GFR-binding peptide
GGGGVVGKDKYLVSIPSLDQPVVVGKD

SEQ ID NO: 1379 - protein, 29 aa, Artificial Sequence
  Cyclic GFR-binding peptide
GGGGGGQQKDNKYLVSIPSHHVRSQQKDN

SEQ ID NO: 1380 - protein, 27 aa, Artificial Sequence
  Cyclic GFR-binding peptide
AAAANNAADKYLVSIPSLQVQTNNAAD

SEQ ID NO: 1381 - protein, 29 aa, Artificial Sequence
  Cyclic GFR-binding peptide
AAAAAANNASDLYLISIPELETPVNNASD

SEQ ID NO: 1382 - protein, 27 aa, Artificial Sequence
  Cyclic GFR-binding peptide
GGGGNSSDDLYLISIPEMKTPVNSSDD

SEQ ID NO: 1383 - protein, 29 aa, Artificial Sequence
  Cyclic GFR-binding peptide
GGGGGGVRGNDLYLISIPELKTPVVRGND

SEQ ID NO: 1384 - protein, 27 aa, Artificial Sequence
  Cyclic GFR-binding peptide
AAAAPKRGVLYLISIPELQTPVPKRGV

SEQ ID NO: 1385 - protein, 29 aa, Artificial Sequence
  Cyclic GFR-binding peptide
AAAAAAPTKGILYLISIPELRTPVPTKGI

SEQ ID NO: 1386 - protein, 27 aa, Artificial Sequence
  Cyclic GFR-binding peptide
GGGGPTRGVLYLISIPETKTPVPTRGV

SEQ ID NO: 1387 - protein, 29 aa, Artificial Sequence
  Cyclic GFR-binding peptide
GGGGGGHPKIRLYLISIPELATPVHPKIR

SEQ ID NO: 1388 - protein, 27 aa, Artificial Sequence
  Cyclic GFR-binding peptide
AAAAHPKIRLYLISIPELDTPVHPKIR

SEQ ID NO: 1389 - protein, 29 aa, Artificial Sequence
  Cyclic GFR-binding peptide
AAAAAAHPKIRLYLISIPEMKEPVHPKIR

SEQ ID NO: 1390 - protein, 27 aa, Artificial Sequence
  Cyclic GFR-binding peptide
GGGGHPKIRLYLISIPELKTPAHPKIR

SEQ ID NO: 1391 - protein, 29 aa, Artificial Sequence
  Cyclic GFR-binding peptide
GGGGGGKRVYELYLISIPELQTPAKRVYE

SEQ ID NO: 1392 - protein, 27 aa, Artificial Sequence
  Cyclic GFR-binding peptide
AAAAKRVIELYLISIPEMKTPTKRVIE

SEQ ID NO: 1393 - protein, 27 aa, Artificial Sequence
  Cyclic GFR-binding peptide
GGGGKENEDLYLISIPELRAPVKENED

SEQ ID NO: 1394 - protein, 29 aa, Artificial Sequence
  Cyclic GFR-binding peptide
GGGGGGNKNEDLYLISIPETKVPANKNED

SEQ ID NO: 1395 - protein, 27 aa, Artificial Sequence
  Cyclic GFR-binding peptide
AAAAKDYEDLYLISIPELAQPVKDYED

SEQ ID NO: 1396 - protein, 29 aa, Artificial Sequence
  Cyclic GFR-binding peptide
AAAAAANSSDDLYLISIPELDQSVNSSDD

SEQ ID NO: 1397 - protein, 27 aa, Artificial Sequence
  Cyclic GFR-binding peptide
GGGGNSSDDLYLISIPELDQPVNSSDD

SEQ ID NO: 1398 - protein, 29 aa, Artificial Sequence
  Cyclic GFR-binding peptide
GGGGGGNSSDDLYLISIPEHHVRSNSSDD

SEQ ID NO: 1399 - protein, 27 aa, Artificial Sequence
  Cyclic GFR-binding peptide
AAAANNSSDLYLISIPELQVQTNNSSD

SEQ ID NO: 1400 - protein, 29 aa, Artificial Sequence
  Cyclic GFR-binding peptide
AAAAAAVGMDDFYLMNIPSLETPTVGMDD

SEQ ID NO: 1401 - protein, 27 aa, Artificial Sequence
  Cyclic GFR-binding peptide
GGGGVVGKDFYLMNIPSMKTPTVVGKD

SEQ ID NO: 1402 - protein, 29 aa, Artificial Sequence
  Cyclic GFR-binding peptide
GGGGGGQQKDNFYLMNIPSLKTPTQQKDN

SEQ ID NO: 1403 - protein, 27 aa, Artificial Sequence
  Cyclic GFR-binding peptide
AAAANNAADFYLMNIPSLQTPTNNAAD

SEQ ID NO: 1404 - protein, 29 aa, Artificial Sequence
  Cyclic GFR-binding peptide
AAAAAANNASDFYLMNIPSLRTPTNNASD

SEQ ID NO: 1405 - protein, 27 aa, Artificial Sequence
  Cyclic GFR-binding peptide
GGGGNSSDDFYLMNIPSTKTPTNSSDD

SEQ ID NO: 1406 - protein, 29 aa, Artificial Sequence
  Cyclic GFR-binding peptide
GGGGGGVRGNDFYLMNIPSLATPTVRGND

SEQ ID NO: 1407 - protein, 27 aa, Artificial Sequence
  Cyclic GFR-binding peptide
AAAAPKRGVFYLMNIPSLDTPTPKRGV

SEQ ID NO: 1408 - protein, 29 aa, Artificial Sequence
  Cyclic GFR-binding peptide
AAAAAAPTKGIFYLMNIPSLETPVPTKGI

SEQ ID NO: 1409 - protein, 27 aa, Artificial Sequence
  Cyclic GFR-binding peptide
GGGGPTRGVFYLMNIPSMKEPVPTRGV

SEQ ID NO: 1410 - protein, 29 aa, Artificial Sequence
  Cyclic GFR-binding peptide
GGGGGGHPKIRFYLMNIPSLKTPAHPKIR

SEQ ID NO: 1411 - protein, 27 aa, Artificial Sequence
  Cyclic GFR-binding peptide
AAAAHPKIRFYLMNIPSLQTPAHPKIR

SEQ ID NO: 1412 - protein, 29 aa, Artificial Sequence
  Cyclic GFR-binding peptide
AAAAAAHPKIRFYLMNIPSLKTPVHPKIR

SEQ ID NO: 1413 - protein, 27 aa, Artificial Sequence
  Cyclic GFR-binding peptide
GGGGHPKIRFYLMNIPSLRAPVHPKIR

SEQ ID NO: 1414 - protein, 29 aa, Artificial Sequence
  Cyclic GFR-binding peptide
GGGGGGKRVYEFYLMNIPSLRTPVKRVYE

SEQ ID NO: 1415 - protein, 27 aa, Artificial Sequence
  Cyclic GFR-binding peptide
AAAAKRVIEFYLMNIPSTKVPAKRVIE

SEQ ID NO: 1416 - protein, 27 aa, Artificial Sequence
  Cyclic GFR-binding peptide
GGGGKENEDFYLMNIPSLAQPVKENED

SEQ ID NO: 1417 - protein, 29 aa, Artificial Sequence
  Cyclic GFR-binding peptide
GGGGGGNKNEDFYLMNIPSLDQSVNKNED

SEQ ID NO: 1418 - protein, 27 aa, Artificial Sequence
  Cyclic GFR-binding peptide
AAAAKDYEDFYLMNIPSLDQPVKDYED

SEQ ID NO: 1419 - protein, 29 aa, Artificial Sequence
  Cyclic GFR-binding peptide
AAAAAANSSDDFYLMNIPSEETPVNSSDD

SEQ ID NO: 1420 - protein, 27 aa, Artificial Sequence
  Cyclic GFR-binding peptide
GGGGNSSDDFYLMNIPSQGTPVNSSDD

SEQ ID NO: 1421 - protein, 29 aa, Artificial Sequence
  Cyclic GFR-binding peptide
GGGGGGNSSDDFYLMNIPSHHVRSNSSDD

SEQ ID NO: 1422 - protein, 27 aa, Artificial Sequence
  Cyclic GFR-binding peptide
AAAANNSSDFYLMNIPSLQVQTNNSSD

SEQ ID NO: 1423 - protein, 29 aa, Artificial Sequence
  Cyclic GFR-binding peptide
AAAAAAVGMDDIYLISIPSLEAPVVGMDD

SEQ ID NO: 1424 - protein, 27 aa, Artificial Sequence
  Cyclic GFR-binding peptide
GGGGVVGKDIYLISIPSMKAPVVVGKD

SEQ ID NO: 1425 - protein, 29 aa, Artificial Sequence
  Cyclic GFR-binding peptide
GGGGGGQQKDNIYLISIPSLKAPVQQKDN

SEQ ID NO: 1426 - protein, 27 aa, Artificial Sequence
  Cyclic GFR-binding peptide
AAAANNAADIYLISIPSLQAPVNNAAD

SEQ ID NO: 1427 - protein, 29 aa, Artificial Sequence
  Cyclic GFR-binding peptide
AAAAAANNASDIYLISIPSLRAPVNNASD

SEQ ID NO: 1428 - protein, 27 aa, Artificial Sequence
  Cyclic GFR-binding peptide
GGGGNSSDDIYLISIPSTKAPVNSSDD

SEQ ID NO: 1429 - protein, 29 aa, Artificial Sequence
  Cyclic GFR-binding peptide
GGGGGGVRGNDIYLISIPSLAAPVVRGND

SEQ ID NO: 1430 - protein, 27 aa, Artificial Sequence
  Cyclic GFR-binding peptide
AAAAPKRGVIYLISIPSLDAPVPKRGV

SEQ ID NO: 1431 - protein, 29 aa, Artificial Sequence
  Cyclic GFR-binding peptide
AAAAAAPTKGIIYLISIPSLETPVPTKGI

SEQ ID NO: 1432 - protein, 27 aa, Artificial Sequence
  Cyclic GFR-binding peptide
GGGGPTRGVIYLISIPSMKEPVPTRGV

SEQ ID NO: 1433 - protein, 29 aa, Artificial Sequence
  Cyclic GFR-binding peptide
GGGGGGHPKIRIYLISIPSLKTPAHPKIR

SEQ ID NO: 1434 - protein, 27 aa, Artificial Sequence
  Cyclic GFR-binding peptide
AAAAHPKIRIYLISIPSLQTPAHPKIR

SEQ ID NO: 1435 - protein, 29 aa, Artificial Sequence
  Cyclic GFR-binding peptide
AAAAAAHPKIRIYLISIPSLKTPVHPKIR

SEQ ID NO: 1436 - protein, 27 aa, Artificial Sequence
  Cyclic GFR-binding peptide
GGGGHPKIRIYLISIPSMKTPTHPKIR

SEQ ID NO: 1437 - protein, 29 aa, Artificial Sequence
  Cyclic GFR-binding peptide
GGGGGGKRVYEIYLISIPSLRTPVKRVYE

SEQ ID NO: 1438 - protein, 27 aa, Artificial Sequence
  Cyclic GFR-binding peptide
AAAAKRVIEIYLISIPSTKVPAKRVIE

SEQ ID NO: 1439 - protein, 27 aa, Artificial Sequence
  Cyclic GFR-binding peptide
GGGGKENEDIYLISIPSLAQPVKENED

SEQ ID NO: 1440 - protein, 29 aa, Artificial Sequence
  Cyclic GFR-binding peptide
GGGGGGNKNEDIYLISIPSLDQSVNKNED

SEQ ID NO: 1441 - protein, 27 aa, Artificial Sequence
  Cyclic GFR-binding peptide
AAAAKDYEDIYLISIPSLDQPVKDYED

SEQ ID NO: 1442 - protein, 29 aa, Artificial Sequence
  Cyclic GFR-binding peptide
AAAAAANSSDDIYLISIPSEETPVNSSDD

SEQ ID NO: 1443 - protein, 27 aa, Artificial Sequence
  Cyclic GFR-binding peptide
GGGGNSSDDIYLISIPSQGTPVNSSDD

SEQ ID NO: 1444 - protein, 29 aa, Artificial Sequence
  Cyclic GFR-binding peptide
GGGGGGNSSDDIYLISIPSHHVRSNSSDD

SEQ ID NO: 1445 - protein, 27 aa, Artificial Sequence
  Cyclic GFR-binding peptide
AAAANNSSDIYLISIPSLQVQTNNSSD

SEQ ID NO: 1446 - protein, 29 aa, Artificial Sequence
  Cyclic GFR-binding peptide
AAAAAAVGMDDIFLISIPSLETPVVGMDD

SEQ ID NO: 1447 - protein, 27 aa, Artificial Sequence
  Cyclic GFR-binding peptide
GGGGVVGKDIFLISIPSMKTPVVVGKD

SEQ ID NO: 1448 - protein, 29 aa, Artificial Sequence
  Cyclic GFR-binding peptide
GGGGGGQQKDNIFLISIPSLKTPVQQKDN

SEQ ID NO: 1449 - protein, 27 aa, Artificial Sequence
  Cyclic GFR-binding peptide
AAAANNAADIFLISIPSLQTPVNNAAD

SEQ ID NO: 1450 - protein, 29 aa, Artificial Sequence
  Cyclic GFR-binding peptide
AAAAAANNASDIFLISIPSLRTPVNNASD

SEQ ID NO: 1451 - protein, 27 aa, Artificial Sequence
  Cyclic GFR-binding peptide
GGGGNSSDDIFLISIPSTKTPVNSSDD

SEQ ID NO: 1452 - protein, 29 aa, Artificial Sequence
  Cyclic GFR-binding peptide
GGGGGGVRGNDIFLISIPSLATPVVRGND

SEQ ID NO: 1453 - protein, 27 aa, Artificial Sequence
  Cyclic GFR-binding peptide
AAAAPKRGVIFLISIPSLDTPVPKRGV

SEQ ID NO: 1454 - protein, 29 aa, Artificial Sequence
  Cyclic GFR-binding peptide
AAAAAAPTKGIIFLISIPSMKEPVPTKGI

SEQ ID NO: 1455 - protein, 27 aa, Artificial Sequence
  Cyclic GFR-binding peptide
GGGGPTRGVIFLISIPSLKTPAPTRGV

SEQ ID NO: 1456 - protein, 29 aa, Artificial Sequence
  Cyclic GFR-binding peptide
GGGGGGHPKIRIFLISIPSLQTPAHPKIR

SEQ ID NO: 1457 - protein, 27 aa, Artificial Sequence
  Cyclic GFR-binding peptide
AAAAHPKIRIFLISIPSMKTPTHPKIR

SEQ ID NO: 1458 - protein, 29 aa, Artificial Sequence
  Cyclic GFR-binding peptide
AAAAAAHPKIRIFLISIPSLRAPVHPKIR

SEQ ID NO: 1459 - protein, 27 aa, Artificial Sequence
  Cyclic GFR-binding peptide
GGGGHPKIRIFLISIPSTKVPAHPKIR

SEQ ID NO: 1460 - protein, 29 aa, Artificial Sequence
  Cyclic GFR-binding peptide
GGGGGGKRVYEIFLISIPSLAQPVKRVYE

SEQ ID NO: 1461 - protein, 27 aa, Artificial Sequence
  Cyclic GFR-binding peptide
AAAAKRVIEIFLISIPSLDQSVKRVIE

SEQ ID NO: 1462 - protein, 27 aa, Artificial Sequence
  Cyclic GFR-binding peptide
GGGGKENEDIFLISIPSLDQPVKENED

SEQ ID NO: 1463 - protein, 29 aa, Artificial Sequence
  Cyclic GFR-binding peptide
GGGGGGNKNEDIFLISIPSHHVRSNKNED

SEQ ID NO: 1464 - protein, 27 aa, Artificial Sequence
  Cyclic GFR-binding peptide
AAAAKDYEDIFLISIPSLQVQTKDYED

SEQ ID NO: 1465 - protein, 29 aa, Artificial Sequence
  Cyclic GFR-binding peptide
AAAAAANSSDDVYLMSLPKLEVPANSSDD

SEQ ID NO: 1466 - protein, 27 aa, Artificial Sequence
  Cyclic GFR-binding peptide
GGGGNSSDDVYLMSLPKMKVPANSSDD

SEQ ID NO: 1467 - protein, 29 aa, Artificial Sequence
  Cyclic GFR-binding peptide
GGGGGGNSSDDVYLMSLPKLKVPANSSDD

SEQ ID NO: 1468 - protein, 27 aa, Artificial Sequence
  Cyclic GFR-binding peptide
AAAANNSSDVYLMSLPKLQVPANNSSD

SEQ ID NO: 1469 - protein, 29 aa, Artificial Sequence
  Cyclic GFR-binding peptide
AAAAAAVGMDDVYLMSLPKLRVPAVGMDD

SEQ ID NO: 1470 - protein, 27 aa, Artificial Sequence
  Cyclic GFR-binding peptide
GGGGVVGKDVYLMSLPKLAVPAVVGKD

SEQ ID NO: 1471 - protein, 29 aa, Artificial Sequence
  Cyclic GFR-binding peptide
GGGGGGQQKDNVYLMSLPKLDVPAQQKDN

SEQ ID NO: 1472 - protein, 27 aa, Artificial Sequence
  Cyclic GFR-binding peptide
AAAANNAADVYLMSLPKLETPVNNAAD

SEQ ID NO: 1473 - protein, 29 aa, Artificial Sequence
  Cyclic GFR-binding peptide
AAAAAANNASDVYLMSLPKMKEPVNNASD

SEQ ID NO: 1474 - protein, 27 aa, Artificial Sequence
  Cyclic GFR-binding peptide
GGGGNSSDDVYLMSLPKLKTPANSSDD

SEQ ID NO: 1475 - protein, 29 aa, Artificial Sequence
  Cyclic GFR-binding peptide
GGGGGGVRGNDVYLMSLPKLQTPAVRGND

SEQ ID NO: 1476 - protein, 27 aa, Artificial Sequence
  Cyclic GFR-binding peptide
AAAAPKRGVVYLMSLPKLKTPVPKRGV

SEQ ID NO: 1477 - protein, 29 aa, Artificial Sequence
  Cyclic GFR-binding peptide
AAAAAAPTKGIVYLMSLPKMKTPTPTKGI

SEQ ID NO: 1478 - protein, 27 aa, Artificial Sequence
  Cyclic GFR-binding peptide
GGGGPTRGVVYLMSLPKLRAPVKENED

SEQ ID NO: 1479 - protein, 29 aa, Artificial Sequence
  Cyclic GFR-binding peptide
GGGGGGHPKIRVYLMSLPKLRTPVNKNED

SEQ ID NO: 1480 - protein, 27 aa, Artificial Sequence
  Cyclic GFR-binding peptide
AAAAHPKIRVYLMSLPKLAQPVKDYED

SEQ ID NO: 1481 - protein, 29 aa, Artificial Sequence
  Cyclic GFR-binding peptide
AAAAAAHPKIRVYLMSLPKLDQSVNSSDD

SEQ ID NO: 1482 - protein, 27 aa, Artificial Sequence
  Cyclic GFR-binding peptide
GGGGHPKIRVYLMSLPKLDQPVNSSDD

SEQ ID NO: 1483 - protein, 29 aa, Artificial Sequence
  Cyclic GFR-binding peptide
GGGGGGKRVYEVYLMSLPKEETPVNSSDD

SEQ ID NO: 1484 - protein, 27 aa, Artificial Sequence
  Cyclic GFR-binding peptide
AAAAKRVIEVYLMSLPKQGTPVNNSSD

SEQ ID NO: 1485 - protein, 27 aa, Artificial Sequence
  Cyclic GFR-binding peptide
GGGGKENEDVYLMSLPKHHVRSVGMDD

SEQ ID NO: 1486 - protein, 29 aa, Artificial Sequence
  Cyclic GFR-binding peptide
GGGGGGNKNEDVYLMSLPKLQVQTVVGKD

SEQ ID NO: 1487 - protein, 27 aa, Artificial Sequence
  Cyclic GFR-binding peptide
AAAAKDYEDYYVIPLPELEQPVQQKDN

SEQ ID NO: 1488 - protein, 29 aa, Artificial Sequence
  Cyclic GFR-binding peptide
AAAAAANSSDDYYVIPLPEMKQPVNNAAD

SEQ ID NO: 1489 - protein, 27 aa, Artificial Sequence
  Cyclic GFR-binding peptide
GGGGNSSDDYYVIPLPELKQPVNNASD

SEQ ID NO: 1490 - protein, 29 aa, Artificial Sequence
  Cyclic GFR-binding peptide
GGGGGGNSSDDYYVIPLPELQQPVNSSDD

SEQ ID NO: 1491 - protein, 27 aa, Artificial Sequence
  Cyclic GFR-binding peptide
AAAANNSSDYYVIPLPELRQPVVRGND

SEQ ID NO: 1492 - protein, 29 aa, Artificial Sequence
  Cyclic GFR-binding peptide
AAAAAAVGMDDYYVIPLPETKQPVPKRGV

SEQ ID NO: 1493 - protein, 27 aa, Artificial Sequence
  Cyclic GFR-binding peptide
GGGGVVGKDYYVIPLPELDQPVPTKGI

SEQ ID NO: 1494 - protein, 29 aa, Artificial Sequence
  Cyclic GFR-binding peptide
GGGGGGQQKDNYYVIPLPELETPVPTRGV

SEQ ID NO: 1495 - protein, 27 aa, Artificial Sequence
  Cyclic GFR-binding peptide
AAAANNAADYYVIPLPEMKEPVHPKIR

SEQ ID NO: 1496 - protein, 29 aa, Artificial Sequence
  Cyclic GFR-binding peptide
AAAAAANNASDYYVIPLPELKTPAHPKIR

SEQ ID NO: 1497 - protein, 27 aa, Artificial Sequence
  Cyclic GFR-binding peptide
GGGGNSSDDYYVIPLPELQTPAHPKIR

SEQ ID NO: 1498 - protein, 29 aa, Artificial Sequence
  Cyclic GFR-binding peptide
GGGGGGVRGNDYYVIPLPELKTPVHPKIR

SEQ ID NO: 1499 - protein, 27 aa, Artificial Sequence
  Cyclic GFR-binding peptide
AAAAPKRGVYYVIPLPEMKTPTKRVYE

SEQ ID NO: 1500 - protein, 29 aa, Artificial Sequence
  Cyclic GFR-binding peptide
AAAAAAPTKGIYYVIPLPELRAPVKRVIE

SEQ ID NO: 1501 - protein, 27 aa, Artificial Sequence
  Cyclic GFR-binding peptide
GGGGPTRGVYYVIPLPELRTPVKENED

SEQ ID NO: 1502 - protein, 29 aa, Artificial Sequence
  Cyclic GFR-binding peptide
GGGGGGHPKIRYYVIPLPETKVPANKNED

SEQ ID NO: 1503 - protein, 27 aa, Artificial Sequence
  Cyclic GFR-binding peptide
AAAAHPKIRYYVIPLPELDQSVKDYED

SEQ ID NO: 1504 - protein, 29 aa, Artificial Sequence
  Cyclic GFR-binding peptide
AAAAAAHPKIRYYVIPLPEEETPVNSSDD

SEQ ID NO: 1505 - protein, 27 aa, Artificial Sequence
  Cyclic GFR-binding peptide
GGGGHPKIRYYVIPLPEQGTPVNSSDD

SEQ ID NO: 1506 - protein, 29 aa, Artificial Sequence
  Cyclic GFR-binding peptide
GGGGGGKRVYEYYVIPLPEHHVRSNSSDD

SEQ ID NO: 1507 - protein, 27 aa, Artificial Sequence
  Cyclic GFR-binding peptide
AAAAKRVIEYYVIPLPELQVQTNNSSD

SEQ ID NO: 1508 - protein, 27 aa, Artificial Sequence
  Cyclic GFR-binding peptide
GGGGKENEDYYLITLPELEQSVVGMDD

SEQ ID NO: 1509 - protein, 29 aa, Artificial Sequence
  Cyclic GFR-binding peptide
GGGGGGNKNEDYYLITLPEMKQSVVVGKD

SEQ ID NO: 1510 - protein, 27 aa, Artificial Sequence
  Cyclic GFR-binding peptide
AAAAKDYEDYYLITLPELKQSVQQKDN

SEQ ID NO: 1511 - protein, 29 aa, Artificial Sequence
  Cyclic GFR-binding peptide
AAAAAANSSDDYYLITLPELQQSVNNAAD

SEQ ID NO: 1512 - protein, 27 aa, Artificial Sequence
  Cyclic GFR-binding peptide
GGGGNSSDDYYLITLPELRQSVNNASD

SEQ ID NO: 1513 - protein, 29 aa, Artificial Sequence
  Cyclic GFR-binding peptide
GGGGGGNSSDDYYLITLPETKQSVNSSDD

SEQ ID NO: 1514 - protein, 27 aa, Artificial Sequence
  Cyclic GFR-binding peptide
AAAANNSSDYYLITLPELAQSVVRGND

SEQ ID NO: 1515 - protein, 29 aa, Artificial Sequence
  Cyclic GFR-binding peptide
AAAAAAVGMDDYYLITLPELDQSVPKRGV

SEQ ID NO: 1516 - protein, 27 aa, Artificial Sequence
  Cyclic GFR-binding peptide
GGGGVVGKDYYLITLPELETPVPTKGI

SEQ ID NO: 1517 - protein, 29 aa, Artificial Sequence
  Cyclic GFR-binding peptide
GGGGGGQQKDNYYLITLPEMKEPVPTRGV

SEQ ID NO: 1518 - protein, 27 aa, Artificial Sequence
  Cyclic GFR-binding peptide
AAAANNAADYYLITLPELKTPAHPKIR

SEQ ID NO: 1519 - protein, 29 aa, Artificial Sequence
  Cyclic GFR-binding peptide
AAAAAANNASDYYLITLPELQTPAHPKIR

SEQ ID NO: 1520 - protein, 27 aa, Artificial Sequence
  Cyclic GFR-binding peptide
GGGGNSSDDYYLITLPELKTPVHPKIR

SEQ ID NO: 1521 - protein, 29 aa, Artificial Sequence
  Cyclic GFR-binding peptide
GGGGGGVRGNDYYLITLPEMKTPTHPKIR

SEQ ID NO: 1522 - protein, 27 aa, Artificial Sequence
  Cyclic GFR-binding peptide
AAAAPKRGVYYLITLPELRAPVKRVYE

SEQ ID NO: 1523 - protein, 29 aa, Artificial Sequence
  Cyclic GFR-binding peptide
AAAAAAPTKGIYYLITLPELRTPVKRVIE

SEQ ID NO: 1524 - protein, 27 aa, Artificial Sequence
  Cyclic GFR-binding peptide
GGGGPTRGVYYLITLPETKVPAKENED

SEQ ID NO: 1525 - protein, 29 aa, Artificial Sequence
  Cyclic GFR-binding peptide
GGGGGGHPKIRYYLITLPELAQPVNKNED

SEQ ID NO: 1526 - protein, 27 aa, Artificial Sequence
  Cyclic GFR-binding peptide
AAAAHPKIRYYLITLPEEETPVKDYED

SEQ ID NO: 1527 - protein, 29 aa, Artificial Sequence
  Cyclic GFR-binding peptide
AAAAAAHPKIRYYLITLPEQGTPVNSSDD

SEQ ID NO: 1528 - protein, 27 aa, Artificial Sequence
  Cyclic GFR-binding peptide
GGGGHPKIRYYLITLPEHHVRSNSSDD

SEQ ID NO: 1529 - protein, 29 aa, Artificial Sequence
  Cyclic GFR-binding peptide
GGGGGGKRVYEYYLITLPELQVQTNSSDD

SEQ ID NO: 1530 - protein, 27 aa, Artificial Sequence
  Cyclic GFR-binding peptide
AAAAKRVIEYYLITLPELEQPVNNSSD

SEQ ID NO: 1531 - protein, 27 aa, Artificial Sequence
  Cyclic GFR-binding peptide
GGGGKENEDYYLITLPEMKQPVVGMDD

SEQ ID NO: 1532 - protein, 29 aa, Artificial Sequence
  Cyclic GFR-binding peptide
GGGGGGNKNEDYYLITLPELKQPVVVGKD

SEQ ID NO: 1533 - protein, 27 aa, Artificial Sequence
  Cyclic GFR-binding peptide
AAAAKDYEDYYLITLPELQQPVQQKDN

SEQ ID NO: 1534 - protein, 29 aa, Artificial Sequence
  Cyclic GFR-binding peptide
AAAAAANSSDDYYLITLPELRQPVNNAAD

SEQ ID NO: 1535 - protein, 27 aa, Artificial Sequence
  Cyclic GFR-binding peptide
GGGGNSSDDYYLITLPETKQPVNNASD

SEQ ID NO: 1536 - protein, 29 aa, Artificial Sequence
  Cyclic GFR-binding peptide
GGGGGGNSSDDYYLITLPELDQPVNSSDD

SEQ ID NO: 1537 - protein, 27 aa, Artificial Sequence
  Cyclic GFR-binding peptide
AAAANNSSDMIQMTINSQGTPVVRGND

SEQ ID NO: 1538 - protein, 29 aa, Artificial Sequence
  Cyclic GFR-binding peptide
AAAAAAVGMDDMIQMTINSMKEPVPKRGV

SEQ ID NO: 1539 - protein, 27 aa, Artificial Sequence
  Cyclic GFR-binding peptide
GGGGVVGKDMIQMTINSLKTPAPTKGI

SEQ ID NO: 1540 - protein, 29 aa, Artificial Sequence
  Cyclic GFR-binding peptide
GGGGGGQQKDNMIQMTINSLQTPAPTRGV

SEQ ID NO: 1541 - protein, 27 aa, Artificial Sequence
  Cyclic GFR-binding peptide
AAAANNAADMIQMTINSMKTPTHPKIR

SEQ ID NO: 1542 - protein, 29 aa, Artificial Sequence
  Cyclic GFR-binding peptide
AAAAAANNASDMIQMTINSLRAPVHPKIR

SEQ ID NO: 1543 - protein, 27 aa, Artificial Sequence
  Cyclic GFR-binding peptide
GGGGNSSDDMIQMTINSTKVPAHPKIR

SEQ ID NO: 1544 - protein, 29 aa, Artificial Sequence
  Cyclic GFR-binding peptide
GGGGGGVRGNDMIQMTINSLAQPVHPKIR

SEQ ID NO: 1545 - protein, 27 aa, Artificial Sequence
  Cyclic GFR-binding peptide
AAAAPKRGVMIQMTINSLDQSVKRVYE

SEQ ID NO: 1546 - protein, 29 aa, Artificial Sequence
  Cyclic GFR-binding peptide
AAAAAAPTKGIMIQMTINSLDQPVKRVIE

SEQ ID NO: 1547 - protein, 27 aa, Artificial Sequence
  Cyclic GFR-binding peptide
GGGGPTRGVMIQMTINSHHVRSKENED

SEQ ID NO: 1548 - protein, 29 aa, Artificial Sequence
  Cyclic GFR-binding peptide
GGGGGGHPKIRMIQMTINSLQVQTNKNED

SEQ ID NO: 1549 - protein, 27 aa, Artificial Sequence
  Cyclic GFR-binding peptide
AAAAHPKIRVKAVKVSRLQVRSKDYED

SEQ ID NO: 1550 - protein, 29 aa, Artificial Sequence
  Cyclic GFR-binding peptide
AAAAAAHPKIRVKAVKVSRLETPVNSSDD

SEQ ID NO: 1551 - protein, 27 aa, Artificial Sequence
  Cyclic GFR-binding peptide
GGGGHPKIRVKAVKVSRMKEPVNSSDD

SEQ ID NO: 1552 - protein, 29 aa, Artificial Sequence
  Cyclic GFR-binding peptide
GGGGGGKRVYEVKAVKVSRLKTPANSSDD

SEQ ID NO: 1553 - protein, 27 aa, Artificial Sequence
  Cyclic GFR-binding peptide
AAAAKRVIEVKAVKVSRLQTPANNSSD

SEQ ID NO: 1554 - protein, 27 aa, Artificial Sequence
  Cyclic GFR-binding peptide
GGGGKENEDVKAVKVSRLKTPVVGMDD

SEQ ID NO: 1555 - protein, 29 aa, Artificial Sequence
  Cyclic GFR-binding peptide
GGGGGGNKNEDVKAVKVSRMKTPTVVGKD

SEQ ID NO: 1556 - protein, 27 aa, Artificial Sequence
  Cyclic GFR-binding peptide
AAAAKDYEDVKAVKVSRLRAPVQQKDN

SEQ ID NO: 1557 - protein, 29 aa, Artificial Sequence
  Cyclic GFR-binding peptide
AAAAAANSSDDVKAVKVSRLRTPVNNAAD

SEQ ID NO: 1558 - protein, 27 aa, Artificial Sequence
  Cyclic GFR-binding peptide
GGGGNSSDDVKAVKVSRTKVPANNASD

SEQ ID NO: 1559 - protein, 29 aa, Artificial Sequence
  Cyclic GFR-binding peptide
GGGGGGNSSDDVKAVKVSRLAQPVNSSDD

SEQ ID NO: 1560 - protein, 27 aa, Artificial Sequence
  Cyclic GFR-binding peptide
AAAANNSSDVKAVKVSRLDQSVVRGND

SEQ ID NO: 1561 - protein, 29 aa, Artificial Sequence
  Cyclic GFR-binding peptide
AAAAAAVGMDDVKAVKVSRLDQPVPKRGV

SEQ ID NO: 1562 - protein, 27 aa, Artificial Sequence
  Cyclic GFR-binding peptide
GGGGVVGKDVKAVKVSREETPVPTKGI

SEQ ID NO: 1563 - protein, 29 aa, Artificial Sequence
  Cyclic GFR-binding peptide
GGGGGGQQKDNVKAVKVSRQGTPVPTRGV

SEQ ID NO: 1564 - protein, 27 aa, Artificial Sequence
  Cyclic GFR-binding peptide
AAAANNAADVKAVKVSRLQVQTHPKIR

SEQ ID NO: 1565 - protein, 29 aa, Artificial Sequence
  Cyclic GFR-binding peptide
AAAAAANNASDIKRVQVPRHHVQTHPKIR

SEQ ID NO: 1566 - protein, 27 aa, Artificial Sequence
  Cyclic GFR-binding peptide
GGGGNSSDDIKRVQVPRLETPVHPKIR

SEQ ID NO: 1567 - protein, 29 aa, Artificial Sequence
  Cyclic GFR-binding peptide
GGGGGGVRGNDIKRVQVPRMKEPVHPKIR

SEQ ID NO: 1568 - protein, 27 aa, Artificial Sequence
  Cyclic GFR-binding peptide
AAAAPKRGVIKRVQVPRLKTPAKRVYE

SEQ ID NO: 1569 - protein, 29 aa, Artificial Sequence
  Cyclic GFR-binding peptide
AAAAAAPTKGIIKRVQVPRLQTPAKRVIE

SEQ ID NO: 1570 - protein, 27 aa, Artificial Sequence
  Cyclic GFR-binding peptide
GGGGPTRGVIKRVQVPRLKTPVKENED

SEQ ID NO: 1571 - protein, 29 aa, Artificial Sequence
  Cyclic GFR-binding peptide
GGGGGGHPKIRIKRVQVPRMKTPTNKNED

SEQ ID NO: 1572 - protein, 27 aa, Artificial Sequence
  Cyclic GFR-binding peptide
AAAAHPKIRIKRVQVPRLRAPVKDYED

SEQ ID NO: 1573 - protein, 29 aa, Artificial Sequence
  Cyclic GFR-binding peptide
AAAAAAHPKIRIKRVQVPRLRTPVNSSDD

SEQ ID NO: 1574 - protein, 27 aa, Artificial Sequence
  Cyclic GFR-binding peptide
GGGGHPKIRIKRVQVPRTKVPANSSDD

SEQ ID NO: 1575 - protein, 29 aa, Artificial Sequence
  Cyclic GFR-binding peptide
GGGGGGKRVYEIKRVQVPRLAQPVNSSDD

SEQ ID NO: 1576 - protein, 27 aa, Artificial Sequence
  Cyclic GFR-binding peptide
AAAAKRVIEIKRVQVPRLDQSVNNSSD

SEQ ID NO: 1577 - protein, 27 aa, Artificial Sequence
  Cyclic GFR-binding peptide
GGGGKENEDIKRVQVPRLDQPVVGMDD

SEQ ID NO: 1578 - protein, 29 aa, Artificial Sequence
  Cyclic GFR-binding peptide
GGGGGGNKNEDIKRVQVPREETPVVVGKD

SEQ ID NO: 1579 - protein, 27 aa, Artificial Sequence
  Cyclic GFR-binding peptide
AAAAKDYEDIKRVQVPRQGTPVQQKDN

SEQ ID NO: 1580 - protein, 29 aa, Artificial Sequence
  Cyclic GFR-binding peptide
AAAAAANSSDDIKRVQVPRHHVRSNNAAD

SEQ ID NO: 1581 - protein, 43 aa, Artificial Sequence
  Cyclic GFR-binding peptide
GGGGGGGGGDENEKVVNDEGLESVPEDLSSLSVLFFDENEKVV

SEQ ID NO: 1582 - protein, 43 aa, Artificial Sequence
  Cyclic GFR-binding peptide
GGGGGGGGGDDSSNVIRVPSTSSVPTGQSAISTLYLDDSSNVI

SEQ ID NO: 1583 - protein, 43 aa, Artificial Sequence
  Cyclic GFR-binding peptide
GGGGGGGGGDDSSNVIRVPSTSSAPTKMNAISMLYFDENEKVV

SEQ ID NO: 1584 - protein, 43 aa, Artificial Sequence
  Cyclic GFR-binding peptide
GGGGGGGGGDENEKVVGIPEPSSAPVDLKPLSTLYVDENEKVV

SEQ ID NO: 1585 - protein, 43 aa, Artificial Sequence
  Cyclic GFR-binding peptide
AAAAAAAAADENEKVVAASKASSVPQEEEPLPMVYYDAANNVV

SEQ ID NO: 1586 - protein, 43 aa, Artificial Sequence
  Cyclic GFR-binding peptide
GGGGGGGGGDDSSNVIKIPKASSVPTGGSNITVQIMDDSSNVI

SEQ ID NO: 1587 - protein, 43 aa, Artificial Sequence
  Cyclic GFR-binding peptide
AAAAAAAAADENEKVVAASKASSSRVELRSVKIAKVDDSSNVI

SEQ ID NO: 1588 - protein, 43 aa, Artificial Sequence
  Cyclic GFR-binding peptide
GGGGGGGGGDENEKVVKIPKASSTQVRLRPVQIRKIDAANNVV

SEQ ID NO: 1589 - protein, 43 aa, Artificial Sequence
  Cyclic GFR-binding peptide
GGGGGGGGGDDSSNVISTPPTSSSRVQLSAISMLYLDDSSNVI

SEQ ID NO: 1590 - protein, 43 aa, Artificial Sequence
  Cyclic GFR-binding peptide
GGGGGGGGGDENEKVVRVPSTSSTQVKMSAISMLYLDENEKVV

SEQ ID NO: 1591 - protein, 43 aa, Artificial Sequence
  Cyclic GFR-binding peptide
AAAAAAAAADAANNVVKIPKASSSRVRLSSLSTLFFDAANNVV

SEQ ID NO: 1592 - protein, 43 aa, Artificial Sequence
  Cyclic GFR-binding peptide
GGGGGGGGGDDSSNVIAASKASSTPTDLNAISTLYFDDSSNVI

SEQ ID NO: 1593 - protein, 43 aa, Artificial Sequence
  Cyclic GFR-binding peptide
GGGGGGGGGDENEKVVRVPSTSSTQVDLNAISVLYFDENEKVV

SEQ ID NO: 1594 - protein, 43 aa, Artificial Sequence
  Cyclic GFR-binding peptide
AAAAAAAAADAANNVVGIPEPSSVSQELSATSMLYYDAANNVV

SEQ ID NO: 1595 - protein, 43 aa, Artificial Sequence
  Cyclic GFR-binding peptide
GGGGGGGGGDDSSNVIGIPEPSSAPTRLEPISMLYLDENEKVV

SEQ ID NO: 1596 - protein, 43 aa, Artificial Sequence
  Cyclic GFR-binding peptide
GGGGGGGGGDENEKVVKIPKASSVSQQLEPISTLYLDENEKVV

SEQ ID NO: 1597 - protein, 43 aa, Artificial Sequence
  Cyclic GFR-binding peptide
GGGGGGGGGDENEKVVSTPPTSSVPTEVSPINTLYFDENEKVV

SEQ ID NO: 1598 - protein, 43 aa, Artificial Sequence
  Cyclic GFR-binding peptide
AAAAAAAAADENEKVVKIPKASSVPTKMKPLSVLYVDDSSNVI

SEQ ID NO: 1599 - protein, 43 aa, Artificial Sequence
  Cyclic GFR-binding peptide
GGGGGGGGGDDSSNVISTPPTSSVSQKMKPLSILYVDDSSNVI

SEQ ID NO: 1600 - protein, 45 aa, Artificial Sequence
  Cyclic GFR-binding peptide
GGGGGGGGGFDNDENVVRVPSTSSVPEKMEPLTMLYYFDNDENVV

SEQ ID NO: 1601 - protein, 45 aa, Artificial Sequence
  Cyclic GFR-binding peptide
GGGGGGGGGFDNDENVVSTPPTSSTPTKMSNITTQIMFDNDENVV

SEQ ID NO: 1602 - protein, 43 aa, Artificial Sequence
  Cyclic GFR-binding peptide
AAAAAAAAADENEKVVRVPSTSSVPAEESNITVQIMDDSSNVI

SEQ ID NO: 1603 - protein, 45 aa, Artificial Sequence
  Cyclic GFR-binding peptide
GGGGGGGGGFDNDENVVAASKASSVPQRLRSVKVAKVFDNDENVV

SEQ ID NO: 1604 - protein, 43 aa, Artificial Sequence
  Cyclic GFR-binding peptide
AAAAAAAAADAANNVVKIPKASSTQVRLRSVKTAKVDAANNVV

SEQ ID NO: 1605 - protein, 43 aa, Artificial Sequence
  Cyclic GFR-binding peptide
AAAAAAAAADENEKVVAASKASSVPEKMRPVQTRKIDDSSNVI

SEQ ID NO: 1606 - protein, 45 aa, Artificial Sequence
  Cyclic GFR-binding peptide
GGGGGGGGGFDNDENVVGIPEPSSAPVDMRPVQIRKIFDNDENVV

SEQ ID NO: 1607 - protein, 15 aa, Artificial Sequence
  Cyclic GFR-binding peptide
IKPTKGIFYLISIAN

SEQ ID NO: 1608 - protein, 13 aa, Artificial Sequence
  Cyclic GFR-binding peptide
LYLVSIASLQTPA

SEQ ID NO: 1609 - protein, 18 aa, Artificial Sequence
  Cyclic GFR-binding peptide
  MOD_RES (14)..(15): Xaa is C or S
KYLMSIPSLETPVXXAKP

SEQ ID NO: 1610 - protein, 21 aa, Artificial Sequence
  Cyclic GFR-binding peptide
FIPKKRVIEFYLVSIANLQVQ

SEQ ID NO: 1611 - protein, 15 aa, Artificial Sequence
  Cyclic GFR-binding peptide
IVNSSDDKYLVSIPS

SEQ ID NO: 1612 - protein, 27 aa, Artificial Sequence
  Cyclic GFR-binding peptide
  MOD_RES (21)..(22): Xaa is C or S
TPVGMDDFYLVSIANLKTPVXXAKGVK

SEQ ID NO: 1613 - protein, 29 aa, Artificial Sequence
  Cyclic GFR-binding peptide
  MOD_RES (25)..(25): Xaa is C or S
FIPKKRVIEKYLVSIPSLQVQTPRXQVNR

SEQ ID NO: 1614 - protein, 18 aa, Artificial Sequence
  Cyclic GFR-binding peptide
  MOD_RES (14)..(15): Xaa is C or S
KYLISIPSLDQSVXXPSA

SEQ ID NO: 1615 - protein, 19 aa, Artificial Sequence
  Cyclic GFR-binding peptide
  MOD_RES (14)..(15): Xaa is C or S
YYLISTASLDQSVXXPSAS

SEQ ID NO: 1616 - protein, 27 aa, Artificial Sequence
  Cyclic GFR-binding peptide
  MOD_RES (21)..(22): Xaa is C or S
TPVGMDDLYLVSIASLKTPVXXAKGVK

SEQ ID NO: 1617 - protein, 17 aa, Artificial Sequence
  Cyclic GFR-binding peptide
IVNSSDDLYLVSIASLK

SEQ ID NO: 1618 - protein, 19 aa, Artificial Sequence
  Cyclic GFR-binding peptide
  MOD_RES (14)..(15): Xaa is C or S
LYLISIASLDQSVXXPSAS

SEQ ID NO: 1619 - protein, 16 aa, Artificial Sequence
  Cyclic GFR-binding peptide
VVKENEDLYLMSIASL

SEQ ID NO: 1620 - protein, 18 aa, Artificial Sequence
  Cyclic GFR-binding peptide
FIPKKRVIEFYLVSIANL

SEQ ID NO: 1621 - protein, 17 aa, Artificial Sequence
  Cyclic GFR-binding peptide
VKPTRGVKYLISIPSLD

SEQ ID NO: 1622 - protein, 18 aa, Artificial Sequence
  Cyclic GFR-binding peptide
VKPKRGVYYLISTASLAQ

SEQ ID NO: 1623 - protein, 13 aa, Artificial Sequence
  Cyclic GFR-binding peptide
LYLISIASLAQPV

SEQ ID NO: 1624 - protein, 16 aa, Artificial Sequence
  Cyclic GFR-binding peptide
TPVGMDDFYLVSIANL

SEQ ID NO: 1625 - protein, 16 aa, Artificial Sequence
  Cyclic GFR-binding peptide
  MOD_RES (14)..(15): Xaa is C or S
YYLVSTASLQTPAXXP

SEQ ID NO: 1626 - protein, 15 aa, Artificial Sequence
  Cyclic GFR-binding peptide
IKPTKGILYLISIAS

SEQ ID NO: 1627 - protein, 16 aa, Artificial Sequence
  Cyclic GFR-binding peptide
  MOD_RES (14)..(15): Xaa is C or S
YYLISTASLAQPVXXP

SEQ ID NO: 1628 - protein, 17 aa, Artificial Sequence
  Cyclic GFR-binding peptide
VVKENEDKYLMSIPSLE

SEQ ID NO: 1629 - protein, 13 aa, Artificial Sequence
  Cyclic GFR-binding peptide
YYLISTASLDQSV

SEQ ID NO: 1630 - protein, 18 aa, Artificial Sequence
  Cyclic GFR-binding peptide
  MOD_RES (14)..(15): Xaa is C or S
YYLISTASLDQPVXXPSA

SEQ ID NO: 1631 - protein, 18 aa, Artificial Sequence
  Cyclic GFR-binding peptide
  MOD_RES (14)..(15): Xaa is C or S
YYLISTASLAQPVXXPAA

SEQ ID NO: 1632 - protein, 20 aa, Artificial Sequence
  Cyclic GFR-binding peptide
  MOD_RES (14)..(15): Xaa is C or S
YYLVSTASLQTPAXXPKPVT

SEQ ID NO: 1633 - protein, 18 aa, Artificial Sequence
  Cyclic GFR-binding peptide
  MOD_RES (14)..(15): Xaa is C or S
FYLVSIANLKTPAXXAKP

SEQ ID NO: 1634 - protein, 17 aa, Artificial Sequence
  Cyclic GFR-binding peptide
IVNSSDDFYLVSIANLQ

SEQ ID NO: 1635 - protein, 18 aa, Artificial Sequence
  Cyclic GFR-binding peptide
VVKENEDYYLMSTASLET

SEQ ID NO: 1636 - protein, 17 aa, Artificial Sequence
  Cyclic GFR-binding peptide
IVNSSDDFYLVSIANLK

SEQ ID NO: 1637 - protein, 20 aa, Artificial Sequence
  Cyclic GFR-binding peptide
  MOD_RES (16)..(16): Xaa is C or S
YYLVSTASLQVQTPRXQVNR

SEQ ID NO: 1638 - protein, 17 aa, Artificial Sequence
  Cyclic GFR-binding peptide
  MOD_RES (16)..(16): Xaa is C or S
KYLVSIPSLQVQTPRXQ

SEQ ID NO: 1639 - protein, 21 aa, Artificial Sequence
  Cyclic GFR-binding peptide
FIPKKRVIELYLVSIASLQVQ

SEQ ID NO: 1640 - protein, 18 aa, Artificial Sequence
  Cyclic GFR-binding peptide
  MOD_RES (16)..(16): Xaa is C or S
LYLVSIASLQVQTPRXQV

SEQ ID NO: 1641 - protein, 17 aa, Artificial Sequence
  Cyclic GFR-binding peptide
IVNSSDDLYLVSIASLQ

SEQ ID NO: 1642 - protein, 18 aa, Artificial Sequence
  Cyclic GFR-binding peptide
IVNNSSDFYLVSIANLKT

SEQ ID NO: 1643 - protein, 16 aa, Artificial Sequence
  Cyclic GFR-binding peptide
VVKENEDFYLMSIANL

SEQ ID NO: 1644 - protein, 16 aa, Artificial Sequence
  Cyclic GFR-binding peptide
  MOD_RES (14)..(15): Xaa is C or S
LYLISIASLAQPVXXP

SEQ ID NO: 1645 - protein, 16 aa, Artificial Sequence
  Cyclic GFR-binding peptide
  MOD_RES (14)..(15): Xaa is C or S
LYLVSIASLQTPAXXP

SEQ ID NO: 1646 - protein, 18 aa, Artificial Sequence
  Cyclic GFR-binding peptide
  MOD_RES (14)..(15): Xaa is C or S
FYLVSIANLQTPAXXPKP

SEQ ID NO: 1647 - protein, 17 aa, Artificial Sequence
  Cyclic GFR-binding peptide
TPVGMDDKYLVSIPSLK

SEQ ID NO: 1648 - protein, 18 aa, Artificial Sequence
  Cyclic GFR-binding peptide
VVKDYEDLYLMSIASLET

SEQ ID NO: 1649 - protein, 18 aa, Artificial Sequence
  Cyclic GFR-binding peptide
IVNNSSDLYLVSIASLKT

SEQ ID NO: 1650 - protein, 15 aa, Artificial Sequence
  Cyclic GFR-binding peptide
VVKENEDKYLMSIPS

SEQ ID NO: 1651 - protein, 17 aa, Artificial Sequence
  Cyclic GFR-binding peptide
  MOD_RES (16)..(16): Xaa is C or S
LYLVSIASLQVQTPRXQ

SEQ ID NO: 1652 - protein, 15 aa, Artificial Sequence
  Cyclic GFR-binding peptide
VKPKRGVFYLISIAN

SEQ ID NO: 1653 - protein, 19 aa, Artificial Sequence
  Cyclic GFR-binding peptide
VVKDYEDLYLMSIASLETP

SEQ ID NO: 1654 - protein, 16 aa, Artificial Sequence
  Cyclic GFR-binding peptide
IVNSSDDLYLVSIASL

SEQ ID NO: 1655 - protein, 15 aa, Artificial Sequence
  Cyclic GFR-binding peptide
VVKDYEDYYLMSTAS

SEQ ID NO: 1656 - protein, 19 aa, Artificial Sequence
  Cyclic GFR-binding peptide
  MOD_RES (14)..(15): Xaa is C or S
YYLVSTASLQTPAXXPKPV

SEQ ID NO: 1657 - protein, 13 aa, Artificial Sequence
  Cyclic GFR-binding peptide
LYLISIASLDQSV

SEQ ID NO: 1658 - protein, 14 aa, Artificial Sequence
  Cyclic GFR-binding peptide
FYLVSIANLQVQTP

SEQ ID NO: 1659 - protein, 29 aa, Artificial Sequence
  Cyclic GFR-binding peptide
  MOD_RES (25)..(25): Xaa is C or S
FIPKKRVIELYLVSIASLQVQTPRXQVNR

SEQ ID NO: 1660 - protein, 16 aa, Artificial Sequence
  Cyclic GFR-binding peptide
IKPTKGIYYLISTASL

SEQ ID NO: 1661 - protein, 17 aa, Artificial Sequence
  Cyclic GFR-binding peptide
VVKENEDLYLMSIASLE

SEQ ID NO: 1662 - protein, 17 aa, Artificial Sequence
  Cyclic GFR-binding peptide
  MOD_RES (14)..(15): Xaa is C or S
FYLISIANLDQPVXXPS

SEQ ID NO: 1663 - protein, 20 aa, Artificial Sequence
  Cyclic GFR-binding peptide
  MOD_RES (14)..(15): Xaa is C or S
FYLVSIANLKTPAXXAKPVA

SEQ ID NO: 1664 - protein, 16 aa, Artificial Sequence
  Cyclic GFR-binding peptide
  MOD_RES (14)..(15): Xaa is C or S
LYLVSIASLKTPAXXA

SEQ ID NO: 1665 - protein, 18 aa, Artificial Sequence
  Cyclic GFR-binding peptide
  MOD_RES (14)..(15): Xaa is C or S
LYLISIASLDQPVXXPSA

SEQ ID NO: 1666 - protein, 15 aa, Artificial Sequence
  Cyclic GFR-binding peptide
  MOD_RES (14)..(15): Xaa is C or S
LYLISIASLAQPVXX

SEQ ID NO: 1667 - protein, 18 aa, Artificial Sequence
  Cyclic GFR-binding peptide
  MOD_RES (14)..(15): Xaa is C or S
LYLVSIASLKTPVXXAKG

SEQ ID NO: 1668 - protein, 15 aa, Artificial Sequence
  Cyclic GFR-binding peptide
IVNSSDDFYLVSIAN

SEQ ID NO: 1669 - protein, 15 aa, Artificial Sequence
  Cyclic GFR-binding peptide
VKPKRGVYYLISTAS

SEQ ID NO: 1670 - protein, 27 aa, Artificial Sequence
  Cyclic GFR-binding peptide
  MOD_RES (21)..(22): Xaa is C or S
TPVGMDDYYLVSTASLKTPVXXAKGVK

SEQ ID NO: 1671 - protein, 18 aa, Artificial Sequence
  Cyclic GFR-binding peptide
  MOD_RES (16)..(16): Xaa is C or S
YYLVSTASLQVQTPRXQV

SEQ ID NO: 1672 - protein, 27 aa, Artificial Sequence
  Cyclic GFR-binding peptide
  MOD_RES (21)..(22): Xaa is C or S
VKPKRGVLYLISIASLAQPVXXPAASA

SEQ ID NO: 1673 - protein, 18 aa, Artificial Sequence
  Cyclic GFR-binding peptide
  MOD_RES (14)..(15): Xaa is C or S
FYLMSIANLETPVXXAKP

SEQ ID NO: 1674 - protein, 15 aa, Artificial Sequence
  Cyclic GFR-binding peptide
TPVGMDDKYLVSIPS

SEQ ID NO: 1675 - protein, 13 aa, Artificial Sequence
  Cyclic GFR-binding peptide
YYLISTASLAQPV

SEQ ID NO: 1676 - protein, 17 aa, Artificial Sequence
  Cyclic GFR-binding peptide
TPVGMDDLYLVSIASLK

SEQ ID NO: 1677 - protein, 15 aa, Artificial Sequence
  Cyclic GFR-binding peptide
IKPTKGIYYLISTAS

SEQ ID NO: 1678 - protein, 18 aa, Artificial Sequence
  Cyclic GFR-binding peptide
VVKDYEDKYLMSIPSLET

SEQ ID NO: 1679 - protein, 15 aa, Artificial Sequence
  Cyclic GFR-binding peptide
  MOD_RES (14)..(14): Xaa is C or S
YYLVSTASLKTPAXT

SEQ ID NO: 1680 - protein, 18 aa, Artificial Sequence
  Cyclic GFR-binding peptide
IKPTKGILYLISIASLDQ

SEQ ID NO: 1681 - protein, 16 aa, Artificial Sequence
  Cyclic GFR-binding peptide
TPVGMDDLYLVSIASL

SEQ ID NO: 1682 - protein, 27 aa, Artificial Sequence
  Cyclic GFR-binding peptide
  MOD_RES (21)..(22): Xaa is C or S
IVNNSSDYYLVSTASLKTPAXXAKPVA

SEQ ID NO: 1683 - protein, 19 aa, Artificial Sequence
  Cyclic GFR-binding peptide
IVNNSSDYYLVSTASLKTP

SEQ ID NO: 1684 - protein, 17 aa, Artificial Sequence
  Cyclic GFR-binding peptide
  MOD_RES (16)..(16): Xaa is C or S
YYLVSTASLQVQTPRXQ

SEQ ID NO: 1685 - protein, 17 aa, Artificial Sequence
  Cyclic GFR-binding peptide
  MOD_RES (14)..(15): Xaa is C or S
KYLISIPSLAQPVXXPA

SEQ ID NO: 1686 - protein, 29 aa, Artificial Sequence
  Cyclic GFR-binding peptide
  MOD_RES (25)..(25): Xaa is C or S
FIPKKRVIEFYLVSIANLQVQTPRXQVNR

SEQ ID NO: 1687 - protein, 27 aa, Artificial Sequence
  Cyclic GFR-binding peptide
  MOD_RES (21)..(22): Xaa is C or S
VVKDYEDKYLMSIPSLETPVXXAKPIS

SEQ ID NO: 1688 - protein, 27 aa, Artificial Sequence
  Cyclic GFR-binding peptide
  MOD_RES (21)..(22): Xaa is C or S
IVNNSSDFYLVSIANLKTPAXXAKPVA

SEQ ID NO: 1689 - protein, 18 aa, Artificial Sequence
  Cyclic GFR-binding peptide
  MOD_RES (14)..(15): Xaa is C or S
FYLVSIANLKTPVXXAKG

SEQ ID NO: 1690 - protein, 20 aa, Artificial Sequence
  Cyclic GFR-binding peptide
  MOD_RES (14)..(15): Xaa is C or S
YYLMSTASLETPVXXAKPIS

SEQ ID NO: 1691 - protein, 27 aa, Artificial Sequence
  Cyclic GFR-binding peptide
  MOD_RES (21)..(22): Xaa is C or S
IKPTKGILYLISIASLDQSVXXPSASA

SEQ ID NO: 1692 - protein, 17 aa, Artificial Sequence
  Cyclic GFR-binding peptide
VKPTRGVFYLISIANLD

SEQ ID NO: 1693 - protein, 17 aa, Artificial Sequence
  Cyclic GFR-binding peptide
FIPKKRVIEYYLVSTAS

SEQ ID NO: 1694 - protein, 15 aa, Artificial Sequence
  Cyclic GFR-binding peptide
  MOD_RES (14)..(15): Xaa is C or S
YYLISTASLAQPVXX

SEQ ID NO: 1695 - protein, 17 aa, Artificial Sequence
  Cyclic GFR-binding peptide
  MOD_RES (14)..(15): Xaa is C or S
FYLMSIANLETPVXXAK

SEQ ID NO: 1696 - protein, 17 aa, Artificial Sequence
  Cyclic GFR-binding peptide
  MOD_RES (14)..(15): Xaa is C or S
FYLISIANLAQPVXXPA

SEQ ID NO: 1697 - protein, 17 aa, Artificial Sequence
  Cyclic GFR-binding peptide
IVNSSDDKYLVSIPSLQ

SEQ ID NO: 1698 - protein, 20 aa, Artificial Sequence
  Cyclic GFR-binding peptide
  MOD_RES (14)..(15): Xaa is C or S
LYLVSIASLQTPAXXPKPVT

SEQ ID NO: 1699 - protein, 18 aa, Artificial Sequence
  Cyclic GFR-binding peptide
  MOD_RES (14)..(15): Xaa is C or S
LYLMSIASLETPVXXAKP

SEQ ID NO: 1700 - protein, 18 aa, Artificial Sequence
  Cyclic GFR-binding peptide
  MOD_RES (14)..(15): Xaa is C or S
LYLISIASLAQPVXXPAA

SEQ ID NO: 1701 - protein, 19 aa, Artificial Sequence
  Cyclic GFR-binding peptide
  MOD_RES (14)..(15): Xaa is C or S
LYLVSIASLQTPAXXPKPV

SEQ ID NO: 1702 - protein, 17 aa, Artificial Sequence
  Cyclic GFR-binding peptide
IVNSSDDKYLVSIPSLK

SEQ ID NO: 1703 - protein, 18 aa, Artificial Sequence
  Cyclic GFR-binding peptide
VKPTRGVYYLISTASLDQ

SEQ ID NO: 1704 - protein, 17 aa, Artificial Sequence
  Cyclic GFR-binding peptide
  MOD_RES (14)..(15): Xaa is C or S
KYLMSIPSLETPVXXAK

SEQ ID NO: 1705 - protein, 19 aa, Artificial Sequence
  Cyclic GFR-binding peptide
IVNNSSDFYLVSIANLKTP

SEQ ID NO: 1706 - protein, 14 aa, Artificial Sequence
  Cyclic GFR-binding peptide
  MOD_RES (14)..(14): Xaa is C or S
LYLISIASLAQPVX

SEQ ID NO: 1707 - protein, 20 aa, Artificial Sequence
  Cyclic GFR-binding peptide
  MOD_RES (14)..(14): Xaa is C or S
LYLVSIASLKTPAXTPKTVH

SEQ ID NO: 1708 - protein, 20 aa, Artificial Sequence
  Cyclic GFR-binding peptide
  MOD_RES (14)..(15): Xaa is C or S
KYLVSIPSLQTPAXXPKPVT

SEQ ID NO: 1709 - protein, 19 aa, Artificial Sequence
  Cyclic GFR-binding peptide
TPVGMDDKYLVSIPSLKTP

SEQ ID NO: 1710 - protein, 18 aa, Artificial Sequence
  Cyclic GFR-binding peptide
  MOD_RES (14)..(15): Xaa is C or S
KYLISIPSLDQPVXXPSA

SEQ ID NO: 1711 - protein, 13 aa, Artificial Sequence
  Cyclic GFR-binding peptide
LYLVSIASLKTPA

SEQ ID NO: 1712 - protein, 27 aa, Artificial Sequence
  Cyclic GFR-binding peptide
  MOD_RES (21)..(22): Xaa is C or S
IVNNSSDLYLVSIASLKTPAXXAKPVA

SEQ ID NO: 1713 - protein, 19 aa, Artificial Sequence
  Cyclic GFR-binding peptide
  MOD_RES (14)..(15): Xaa is C or S
YYLISTASLAQPVXXPAAS

SEQ ID NO: 1714 - protein, 21 aa, Artificial Sequence
  Cyclic GFR-binding peptide
FIPKKRVIEYYLVSTASLQVQ

SEQ ID NO: 1715 - protein, 17 aa, Artificial Sequence
  Cyclic GFR-binding peptide
  MOD_RES (14)..(15): Xaa is C or S
FYLVSIANLKTPAXXAK

SEQ ID NO: 1716 - protein, 17 aa, Artificial Sequence
  Cyclic GFR-binding peptide
  MOD_RES (14)..(15): Xaa is C or S
KYLISIPSLDQPVXXPS

SEQ ID NO: 1717 - protein, 27 aa, Artificial Sequence
  Cyclic GFR-binding peptide
  MOD_RES (21)..(22): Xaa is C or S
IVNSSDDYYLVSTASLQTPAXXPKPVT

SEQ ID NO: 1718 - protein, 17 aa, Artificial Sequence
  Cyclic GFR-binding peptide
VVKDYEDYYLMSTASLE

SEQ ID NO: 1719 - protein, 19 aa, Artificial Sequence
  Cyclic GFR-binding peptide
  MOD_RES (14)..(15): Xaa is C or S
YYLISTASLDQPVXXPSAS

SEQ ID NO: 1720 - protein, 16 aa, Artificial Sequence
  Cyclic GFR-binding peptide
  MOD_RES (16)..(16): Xaa is C or S
LYLVSIASLQVQTPRX

SEQ ID NO: 1721 - protein, 19 aa, Artificial Sequence
  Cyclic GFR-binding peptide
  MOD_RES (14)..(15): Xaa is C or S
LYLVSIASLKTPAXXAKPV

SEQ ID NO: 1722 - protein, 15 aa, Artificial Sequence
  Cyclic GFR-binding peptide
TPVGMDDLYLVSIAS

SEQ ID NO: 1723 - protein, 16 aa, Artificial Sequence
  Cyclic GFR-binding peptide
VKPKRGVYYLISTASL

SEQ ID NO: 1724 - protein, 20 aa, Artificial Sequence
  Cyclic GFR-binding peptide
  MOD_RES (14)..(15): Xaa is C or S
KYLVSIPSLKTPAXXAKPVA

SEQ ID NO: 1725 - protein, 16 aa, Artificial Sequence
  Cyclic GFR-binding peptide
  MOD_RES (14)..(15): Xaa is C or S
KYLISIPSLAQPVXXP

SEQ ID NO: 1726 - protein, 14 aa, Artificial Sequence
  Cyclic GFR-binding peptide
  MOD_RES (14)..(14): Xaa is C or S
FYLVSIANLKTPAX

SEQ ID NO: 1727 - protein, 27 aa, Artificial Sequence
  Cyclic GFR-binding peptide
  MOD_RES (21)..(22): Xaa is C or S
VVKDYEDFYLMSIANLETPVXXAKPIS

SEQ ID NO: 1728 - protein, 20 aa, Artificial Sequence
  Cyclic GFR-binding peptide
  MOD_RES (16)..(16): Xaa is C or S
FYLVSIANLQVQTPRXQVNR

SEQ ID NO: 1729 - protein, 19 aa, Artificial Sequence
  Cyclic GFR-binding peptide
VKPTRGVKYLISIPSLDQP

SEQ ID NO: 1730 - protein, 16 aa, Artificial Sequence
  Cyclic GFR-binding peptide
  MOD_RES (14)..(15): Xaa is C or S
YYLVSTASLKTPAXXP

SEQ ID NO: 1731 - protein, 19 aa, Artificial Sequence
  Cyclic GFR-binding peptide
  MOD_RES (14)..(15): Xaa is C or S
LYLISIASLDQPVXXPSAS

SEQ ID NO: 1732 - protein, 17 aa, Artificial Sequence
  Cyclic GFR-binding peptide
  MOD_RES (14)..(15): Xaa is C or S
FYLVSIANLKTPVXXAK

SEQ ID NO: 1733 - protein, 16 aa, Artificial Sequence
  Cyclic GFR-binding peptide
IKPTKGILYLISIASL

SEQ ID NO: 1734 - protein, 15 aa, Artificial Sequence
  Cyclic GFR-binding peptide
FYLVSIANLQVQTPR

SEQ ID NO: 1735 - protein, 16 aa, Artificial Sequence
  Cyclic GFR-binding peptide
  MOD_RES (14)..(15): Xaa is C or S
LYLMSIASLETPVXXA

SEQ ID NO: 1736 - protein, 27 aa, Artificial Sequence
  Cyclic GFR-binding peptide
  MOD_RES (21)..(22): Xaa is C or S
TPVGMDDKYLVSIPSLKTPVXXAKGVK

SEQ ID NO: 1737 - protein, 19 aa, Artificial Sequence
  Cyclic GFR-binding peptide
  MOD_RES (14)..(15): Xaa is C or S
KYLISIPSLDQSVXXPSAS

SEQ ID NO: 1738 - protein, 17 aa, Artificial Sequence
  Cyclic GFR-binding peptide
IVNNSSDYYLVSTASLK

SEQ ID NO: 1739 - protein, 27 aa, Artificial Sequence
  Cyclic GFR-binding peptide
  MOD_RES (21)..(22): Xaa is C or S
IKPTKGIKYLISIPSLDQSVXXPSASA

SEQ ID NO: 1740 - protein, 19 aa, Artificial Sequence
  Cyclic GFR-binding peptide
  MOD_RES (14)..(14): Xaa is C or S
FYLVSIANLKTPAXTPKTV

SEQ ID NO: 1741 - protein, 17 aa, Artificial Sequence
  Cyclic GFR-binding peptide
  MOD_RES (14)..(14): Xaa is C or S
LYLVSIASLKTPAXTPK

SEQ ID NO: 1742 - protein, 15 aa, Artificial Sequence
  Cyclic GFR-binding peptide
  MOD_RES (14)..(15): Xaa is C or S
FYLISIANLDQPVXX

SEQ ID NO: 1743 - protein, 27 aa, Artificial Sequence
  Cyclic GFR-binding peptide
  MOD_RES (21)..(22): Xaa is C or S
VVKENEDKYLMSIPSLETPVXXAKPIK

SEQ ID NO: 1744 - protein, 19 aa, Artificial Sequence
  Cyclic GFR-binding peptide
IVNSSDDKYLVSIPSLKTP

SEQ ID NO: 1745 - protein, 14 aa, Artificial Sequence
  Cyclic GFR-binding peptide
  MOD_RES (14)..(14): Xaa is C or S
KYLMSIPSLETPVX

SEQ ID NO: 1746 - protein, 17 aa, Artificial Sequence
  Cyclic GFR-binding peptide
  MOD_RES (14)..(15): Xaa is C or S
YYLISTASLDQSVXXPS

SEQ ID NO: 1747 - protein, 17 aa, Artificial Sequence
  Cyclic GFR-binding peptide
VKPKRGVKYLISIPSLA

SEQ ID NO: 1748 - protein, 18 aa, Artificial Sequence
  Cyclic GFR-binding peptide
IVNSSDDYYLVSTASLKT

SEQ ID NO: 1749 - protein, 20 aa, Artificial Sequence
  Cyclic GFR-binding peptide
  MOD_RES (14)..(15): Xaa is C or S
FYLMSIANLETPVXXAKPIK

SEQ ID NO: 1750 - protein, 18 aa, Artificial Sequence
  Cyclic GFR-binding peptide
IVNSSDDYYLVSTASLQT

SEQ ID NO: 1751 - protein, 18 aa, Artificial Sequence
  Cyclic GFR-binding peptide
  MOD_RES (16)..(16): Xaa is C or S
FYLVSIANLQVQTPRXQV

SEQ ID NO: 1752 - protein, 17 aa, Artificial Sequence
  Cyclic GFR-binding peptide
VVKENEDFYLMSIANLE

SEQ ID NO: 1753 - protein, 15 aa, Artificial Sequence
  Cyclic GFR-binding peptide
  MOD_RES (14)..(15): Xaa is C or S
FYLVSIANLQTPAXX

SEQ ID NO: 1754 - protein, 17 aa, Artificial Sequence
  Cyclic GFR-binding peptide
FIPKKRVIEKYLVSIPS

SEQ ID NO: 1755 - protein, 21 aa, Artificial Sequence
  Cyclic GFR-binding peptide
FIPKKRVIEKYLVSIPSLQVQ

SEQ ID NO: 1756 - protein, 17 aa, Artificial Sequence
  Cyclic GFR-binding peptide
  MOD_RES (14)..(15): Xaa is C or S
LYLVSIASLKTPAXXPK

SEQ ID NO: 1757 - protein, 19 aa, Artificial Sequence
  Cyclic GFR-binding peptide
IVNSSDDKYLVSIPSLQTP

SEQ ID NO: 1758 - protein, 18 aa, Artificial Sequence
  Cyclic GFR-binding peptide
  MOD_RES (14)..(15): Xaa is C or S
LYLVSIASLKTPAXXAKP

SEQ ID NO: 1759 - protein, 16 aa, Artificial Sequence
  Cyclic GFR-binding peptide
TPVGMDDKYLVSIPSL

SEQ ID NO: 1760 - protein, 27 aa, Artificial Sequence
  Cyclic GFR-binding peptide
  MOD_RES (21)..(22): Xaa is C or S
VKPKRGVKYLISIPSLAQPVXXPAASA

SEQ ID NO: 1761 - protein, 15 aa, Artificial Sequence
  Cyclic GFR-binding peptide
  MOD_RES (14)..(15): Xaa is C or S
FYLISIANLAQPVXX

SEQ ID NO: 1762 - protein, 13 aa, Artificial Sequence
  Cyclic GFR-binding peptide
FYLVSIANLQTPA

SEQ ID NO: 1763 - protein, 13 aa, Artificial Sequence
  Cyclic GFR-binding peptide
LYLISIASLDQPV

SEQ ID NO: 1764 - protein, 13 aa, Artificial Sequence
  Cyclic GFR-binding peptide
FYLISIANLAQPV

SEQ ID NO: 1765 - protein, 19 aa, Artificial Sequence
  Cyclic GFR-binding peptide
VKPTRGVLYLISIASLDQP

SEQ ID NO: 1766 - protein, 19 aa, Artificial Sequence
  Cyclic GFR-binding peptide
VKPKRGVKYLISIPSLAQP

SEQ ID NO: 1767 - protein, 14 aa, Artificial Sequence
  Cyclic GFR-binding peptide
  MOD_RES (14)..(14): Xaa is C or S
YYLMSTASLETPVX

SEQ ID NO: 1768 - protein, 14 aa, Artificial Sequence
  Cyclic GFR-binding peptide
  MOD_RES (14)..(14): Xaa is C or S
LYLISIASLDQPVX

SEQ ID NO: 1769 - protein, 16 aa, Artificial Sequence
  Cyclic GFR-binding peptide
VVKDYEDYYLMSTASL

SEQ ID NO: 1770 - protein, 19 aa, Artificial Sequence
  Cyclic GFR-binding peptide
IVNSSDDFYLVSIANLKTP

SEQ ID NO: 1771 - protein, 15 aa, Artificial Sequence
  Cyclic GFR-binding peptide
  MOD_RES (14)..(14): Xaa is C or S
KYLVSIPSLKTPAXT

SEQ ID NO: 1772 - protein, 18 aa, Artificial Sequence
  Cyclic GFR-binding peptide
  MOD_RES (14)..(15): Xaa is C or S
LYLVSIASLKTPAXXPKP

SEQ ID NO: 1773 - protein, 18 aa, Artificial Sequence
  Cyclic GFR-binding peptide
VVKDYEDFYLMSIANLET

SEQ ID NO: 1774 - protein, 17 aa, Artificial Sequence
  Cyclic GFR-binding peptide
VKPKRGVFYLISIANLA

SEQ ID NO: 1775 - protein, 14 aa, Artificial Sequence
  Cyclic GFR-binding peptide
  MOD_RES (14)..(14): Xaa is C or S
FYLISIANLDQSVX

SEQ ID NO: 1776 - protein, 16 aa, Artificial Sequence
  Cyclic GFR-binding peptide
  MOD_RES (14)..(15): Xaa is C or S
YYLISTASLDQPVXXP

SEQ ID NO: 1777 - protein, 16 aa, Artificial Sequence
  Cyclic GFR-binding peptide
VKPTRGVYYLISTASL

SEQ ID NO: 1778 - protein, 18 aa, Artificial Sequence
  Cyclic GFR-binding peptide
TPVGMDDYYLVSTASLKT

SEQ ID NO: 1779 - protein, 18 aa, Artificial Sequence
  Cyclic GFR-binding peptide
  MOD_RES (14)..(15): Xaa is C or S
YYLVSTASLKTPVXXAKG

SEQ ID NO: 1780 - protein, 27 aa, Artificial Sequence
  Cyclic GFR-binding peptide
  MOD_RES (21)..(22): Xaa is C or S
IVNNSSDKYLVSIPSLKTPAXXAKPVA

SEQ ID NO: 1781 - protein, 15 aa, Artificial Sequence
  Cyclic GFR-binding peptide
  MOD_RES (14)..(15): Xaa is C or S
KYLMSIPSLETPVXX

SEQ ID NO: 1782 - protein, 14 aa, Artificial Sequence
  Cyclic GFR-binding peptide
  MOD_RES (14)..(14): Xaa is C or S
FYLISIANLDQPVX

SEQ ID NO: 1783 - protein, 16 aa, Artificial Sequence
  Cyclic GFR-binding peptide
  MOD_RES (14)..(15): Xaa is C or S
YYLISTASLDQSVXXP

SEQ ID NO: 1784 - protein, 13 aa, Artificial Sequence
  Cyclic GFR-binding peptide
FYLISIANLDQPV

SEQ ID NO: 1785 - protein, 16 aa, Artificial Sequence
  Cyclic GFR-binding peptide
IVNSSDDFYLVSIANL

SEQ ID NO: 1786 - protein, 20 aa, Artificial Sequence
  Cyclic GFR-binding peptide
  MOD_RES (14)..(15): Xaa is C or S
KYLISIPSLDQPVXXPSASA

SEQ ID NO: 1787 - protein, 17 aa, Artificial Sequence
  Cyclic GFR-binding peptide
  MOD_RES (14)..(15): Xaa is C or S
FYLVSIANLQTPAXXPK

SEQ ID NO: 1788 - protein, 15 aa, Artificial Sequence
  Cyclic GFR-binding peptide
  MOD_RES (14)..(15): Xaa is C or S
YYLISTASLDQSVXX

SEQ ID NO: 1789 - protein, 15 aa, Artificial Sequence
  Cyclic GFR-binding peptide
IVNNSSDFYLVSIAN

SEQ ID NO: 1790 - protein, 16 aa, Artificial Sequence
  Cyclic GFR-binding peptide
VVKENEDKYLMSIPSL

SEQ ID NO: 1791 - protein, 19 aa, Artificial Sequence
  Cyclic GFR-binding peptide
  MOD_RES (14)..(15): Xaa is C or S
FYLVSIANLKTPVXXAKGV

SEQ ID NO: 1792 - protein, 15 aa, Artificial Sequence
  Cyclic GFR-binding peptide
  MOD_RES (14)..(15): Xaa is C or S
LYLVSIASLKTPAXX

SEQ ID NO: 1793 - protein, 15 aa, Artificial Sequence
  Cyclic GFR-binding peptide
TPVGMDDYYLVSTAS

SEQ ID NO: 1794 - protein, 16 aa, Artificial Sequence
  Cyclic GFR-binding peptide
  MOD_RES (14)..(15): Xaa is C or S
FYLVSIANLKTPVXXA

SEQ ID NO: 1795 - protein, 17 aa, Artificial Sequence
  Cyclic GFR-binding peptide
  MOD_RES (14)..(15): Xaa is C or S
FYLVSIANLKTPAXXPK

SEQ ID NO: 1796 - protein, 16 aa, Artificial Sequence
  Cyclic GFR-binding peptide
  MOD_RES (14)..(15): Xaa is C or S
KYLISIPSLDQSVXXP

SEQ ID NO: 1797 - protein, 18 aa, Artificial Sequence
  Cyclic GFR-binding peptide
  MOD_RES (14)..(15): Xaa is C or S
LYLVSIASLQTPAXXPKP

SEQ ID NO: 1798 - protein, 16 aa, Artificial Sequence
  Cyclic GFR-binding peptide
  MOD_RES (14)..(15): Xaa is C or S
FYLVSIANLQTPAXXP

SEQ ID NO: 1799 - protein, 15 aa, Artificial Sequence
  Cyclic GFR-binding peptide
  MOD_RES (14)..(15): Xaa is C or S
LYLVSIASLQTPAXX

SEQ ID NO: 1800 - protein, 20 aa, Artificial Sequence
  Cyclic GFR-binding peptide
  MOD_RES (14)..(15): Xaa is C or S
LYLMSIASLETPVXXAKPIK

SEQ ID NO: 1801 - protein, 20 aa, Artificial Sequence
  Cyclic GFR-binding peptide
  MOD_RES (14)..(15): Xaa is C or S
FYLISIANLAQPVXXPAASA

SEQ ID NO: 1802 - protein, 13 aa, Artificial Sequence
  Cyclic GFR-binding peptide
LYLVSIASLQVQT

SEQ ID NO: 1803 - protein, 19 aa, Artificial Sequence
  Cyclic GFR-binding peptide
  MOD_RES (14)..(14): Xaa is C or S
LYLVSIASLKTPAXTPKTV

SEQ ID NO: 1804 - protein, 20 aa, Artificial Sequence
  Cyclic GFR-binding peptide
  MOD_RES (14)..(15): Xaa is C or S
LYLISIASLAQPVXXPAASA

SEQ ID NO: 1805 - protein, 13 aa, Artificial Sequence
  Cyclic GFR-binding peptide
FYLVSIANLQVQT

SEQ ID NO: 1806 - protein, 18 aa, Artificial Sequence
  Cyclic GFR-binding peptide
  MOD_RES (14)..(15): Xaa is C or S
FYLISIANLDQSVXXPSA

SEQ ID NO: 1807 - protein, 20 aa, Artificial Sequence
  Cyclic GFR-binding peptide
  MOD_RES (14)..(15): Xaa is C or S
YYLVSTASLKTPAXXPKPVY

SEQ ID NO: 1808 - protein, 16 aa, Artificial Sequence
  Cyclic GFR-binding peptide
  MOD_RES (14)..(15): Xaa is C or S
LYLVSIASLKTPVXXA

SEQ ID NO: 1809 - protein, 18 aa, Artificial Sequence
  Cyclic GFR-binding peptide
  MOD_RES (14)..(14): Xaa is C or S
FYLVSIANLKTPAXTPKT

SEQ ID NO: 1810 - protein, 19 aa, Artificial Sequence
  Cyclic GFR-binding peptide
VVKENEDKYLMSIPSLETP

SEQ ID NO: 1811 - protein, 15 aa, Artificial Sequence
  Cyclic GFR-binding peptide
VKPTRGVFYLISIAN

SEQ ID NO: 1812 - protein, 15 aa, Artificial Sequence
  Cyclic GFR-binding peptide
IVNSSDDLYLVSIAS

SEQ ID NO: 1813 - protein, 19 aa, Artificial Sequence
  Cyclic GFR-binding peptide
  MOD_RES (16)..(16): Xaa is C or S
FYLVSIANLQVQTPRXQVN

SEQ ID NO: 1814 - protein, 17 aa, Artificial Sequence
  Cyclic GFR-binding peptide
VKPTRGVLYLISIASLD

SEQ ID NO: 1815 - protein, 18 aa, Artificial Sequence
  Cyclic GFR-binding peptide
FIPKKRVIEKYLVSIPSL

SEQ ID NO: 1816 - protein, 19 aa, Artificial Sequence
  Cyclic GFR-binding peptide
IKPTKGIYYLISTASLDQS

SEQ ID NO: 1817 - protein, 17 aa, Artificial Sequence
  Cyclic GFR-binding peptide
TPVGMDDFYLVSIANLK

SEQ ID NO: 1818 - protein, 27 aa, Artificial Sequence
  Cyclic GFR-binding peptide
  MOD_RES (21)..(22): Xaa is C or S
VKPKRGVFYLISIANLAQPVXXPAASA

SEQ ID NO: 1819 - protein, 15 aa, Artificial Sequence
  Cyclic GFR-binding peptide
  MOD_RES (14)..(15): Xaa is C or S
FYLVSIANLKTPAXX

SEQ ID NO: 1820 - protein, 27 aa, Artificial Sequence
  Cyclic GFR-binding peptide
  MOD_RES (21)..(22): Xaa is C or S
IVNSSDDKYLVSIPSLKTPAXXPKPVY

SEQ ID NO: 1821 - protein, 18 aa, Artificial Sequence
  Cyclic GFR-binding peptide
IVNNSSDKYLVSIPSLKT

SEQ ID NO: 1822 - protein, 19 aa, Artificial Sequence
  Cyclic GFR-binding peptide
IVNSSDDFYLVSIANLQTP

SEQ ID NO: 1823 - protein, 18 aa, Artificial Sequence
  Cyclic GFR-binding peptide
IKPTKGIYYLISTASLDQ

SEQ ID NO: 1824 - protein, 27 aa, Artificial Sequence
  Cyclic GFR-binding peptide
  MOD_RES (21)..(21): Xaa is C or S
IVNSSDDFYLVSIANLKTPAXTPKTVH

SEQ ID NO: 1825 - protein, 18 aa, Artificial Sequence
  Cyclic GFR-binding peptide
  MOD_RES (14)..(14): Xaa is C or S
LYLVSIASLKTPAXTPKT

SEQ ID NO: 1826 - protein, 20 aa, Artificial Sequence
  Cyclic GFR-binding peptide
  MOD_RES (16)..(16): Xaa is C or S
LYLVSIASLQVQTPRXQVNR

SEQ ID NO: 1827 - protein, 19 aa, Artificial Sequence
  Cyclic GFR-binding peptide
  MOD_RES (14)..(15): Xaa is C or S
YYLMSTASLETPVXXAKPI

SEQ ID NO: 1828 - protein, 18 aa, Artificial Sequence
  Cyclic GFR-binding peptide
  MOD_RES (14)..(15): Xaa is C or S
FYLVSIANLKTPAXXPKP

SEQ ID NO: 1829 - protein, 15 aa, Artificial Sequence
  Cyclic GFR-binding peptide
LYLVSIASLQVQTPR

SEQ ID NO: 1830 - protein, 19 aa, Artificial Sequence
  Cyclic GFR-binding peptide
VVKDYEDYYLMSTASLETP

SEQ ID NO: 1831 - protein, 18 aa, Artificial Sequence
  Cyclic GFR-binding peptide
  MOD_RES (14)..(15): Xaa is C or S
LYLISIASLDQSVXXPSA

SEQ ID NO: 1832 - protein, 17 aa, Artificial Sequence
  Cyclic GFR-binding peptide
  MOD_RES (14)..(15): Xaa is C or S
LYLVSIASLQTPAXXPK

SEQ ID NO: 1833 - protein, 27 aa, Artificial Sequence
  Cyclic GFR-binding peptide
  MOD_RES (21)..(22): Xaa is C or S
IKPTKGIFYLISIANLDQSVXXPSASA

SEQ ID NO: 1834 - protein, 15 aa, Artificial Sequence
  Cyclic GFR-binding peptide
VVKENEDYYLMSTAS

SEQ ID NO: 1835 - protein, 13 aa, Artificial Sequence
  Cyclic GFR-binding peptide
FYLVSIANLKTPA

SEQ ID NO: 1836 - protein, 17 aa, Artificial Sequence
  Cyclic GFR-binding peptide
  MOD_RES (14)..(15): Xaa is C or S
YYLVSTASLKTPVXXAK

SEQ ID NO: 1837 - protein, 17 aa, Artificial Sequence
  Cyclic GFR-binding peptide
  MOD_RES (14)..(15): Xaa is C or S
KYLISIPSLDQSVXXPS

SEQ ID NO: 1838 - protein, 17 aa, Artificial Sequence
  Cyclic GFR-binding peptide
FIPKKRVIEFYLVSIAN

SEQ ID NO: 1839 - protein, 17 aa, Artificial Sequence
  Cyclic GFR-binding peptide
IKPTKGILYLISIASLD

SEQ ID NO: 1840 - protein, 19 aa, Artificial Sequence
  Cyclic GFR-binding peptide
VVKENEDFYLMSIANLETP

SEQ ID NO: 1841 - protein, 17 aa, Artificial Sequence
  Cyclic GFR-binding peptide
IVNNSSDFYLVSIANLK

SEQ ID NO: 1842 - protein, 27 aa, Artificial Sequence
  Cyclic GFR-binding peptide
  MOD_RES (21)..(22): Xaa is C or S
VVKENEDFYLMSIANLETPVXXAKPIK

SEQ ID NO: 1843 - protein, 14 aa, Artificial Sequence
  Cyclic GFR-binding peptide
  MOD_RES (14)..(14): Xaa is C or S
FYLISIANLAQPVX

SEQ ID NO: 1844 - protein, 27 aa, Artificial Sequence
  Cyclic GFR-binding peptide
  MOD_RES (21)..(22): Xaa is C or S
VKPTRGVFYLISIANLDQPVXXPSASA

SEQ ID NO: 1845 - protein, 17 aa, Artificial Sequence
  Cyclic GFR-binding peptide
  MOD_RES (14)..(15): Xaa is C or S
LYLVSIASLKTPAXXAK

SEQ ID NO: 1846 - protein, 15 aa, Artificial Sequence
  Cyclic GFR-binding peptide
  MOD_RES (14)..(15): Xaa is C or S
KYLVSIPSLKTPAXX

SEQ ID NO: 1847 - protein, 17 aa, Artificial Sequence
  Cyclic GFR-binding peptide
IKPTKGIFYLISIANLD

SEQ ID NO: 1848 - protein, 19 aa, Artificial Sequence
  Cyclic GFR-binding peptide
FIPKKRVIEYYLVSTASLQ

SEQ ID NO: 1849 - protein, 27 aa, Artificial Sequence
  Cyclic GFR-binding peptide
  MOD_RES (21)..(22): Xaa is C or S
VVKENEDLYLMSIASLETPVXXAKPIK

SEQ ID NO: 1850 - protein, 14 aa, Artificial Sequence
  Cyclic GFR-binding peptide
  MOD_RES (14)..(14): Xaa is C or S
FYLVSIANLQTPAX

SEQ ID NO: 1851 - protein, 16 aa, Artificial Sequence
  Cyclic GFR-binding peptide
  MOD_RES (14)..(15): Xaa is C or S
KYLVSIPSLKTPAXXP

SEQ ID NO: 1852 - protein, 20 aa, Artificial Sequence
  Cyclic GFR-binding peptide
FIPKKRVIEKYLVSIPSLQV

SEQ ID NO: 1853 - protein, 14 aa, Artificial Sequence
  Cyclic GFR-binding peptide
  MOD_RES (14)..(14): Xaa is C or S
YYLVSTASLKTPAX

SEQ ID NO: 1854 - protein, 19 aa, Artificial Sequence
  Cyclic GFR-binding peptide
  MOD_RES (14)..(15): Xaa is C or S
KYLISIPSLAQPVXXPAAS

SEQ ID NO: 1855 - protein, 15 aa, Artificial Sequence
  Cyclic GFR-binding peptide
  MOD_RES (14)..(15): Xaa is C or S
LYLMSIASLETPVXX

SEQ ID NO: 1856 - protein, 19 aa, Artificial Sequence
  Cyclic GFR-binding peptide
  MOD_RES (14)..(15): Xaa is C or S
FYLISIANLAQPVXXPAAS

SEQ ID NO: 1857 - protein, 13 aa, Artificial Sequence
  Cyclic GFR-binding peptide
KYLISIPSLDQPV

SEQ ID NO: 1858 - protein, 19 aa, Artificial Sequence
  Cyclic GFR-binding peptide
  MOD_RES (14)..(15): Xaa is C or S
KYLMSIPSLETPVXXAKPI

SEQ ID NO: 1859 - protein, 16 aa, Artificial Sequence
  Cyclic GFR-binding peptide
IKPTKGIKYLISIPSL

SEQ ID NO: 1860 - protein, 27 aa, Artificial Sequence
  Cyclic GFR-binding peptide
  MOD_RES (21)..(22): Xaa is C or S
VVKDYEDYYLMSTASLETPVXXAKPIS

SEQ ID NO: 1861 - protein, 19 aa, Artificial Sequence
  Cyclic GFR-binding peptide
  MOD_RES (16)..(16): Xaa is C or S
YYLVSTASLQVQTPRXQVN

SEQ ID NO: 1862 - protein, 14 aa, Artificial Sequence
  Cyclic GFR-binding peptide
  MOD_RES (14)..(14): Xaa is C or S
KYLVSIPSLQTPAX

SEQ ID NO: 1863 - protein, 15 aa, Artificial Sequence
  Cyclic GFR-binding peptide
VKPTRGVKYLISIPS

SEQ ID NO: 1864 - protein, 19 aa, Artificial Sequence
  Cyclic GFR-binding peptide
VVKENEDLYLMSIASLETP

SEQ ID NO: 1865 - protein, 15 aa, Artificial Sequence
  Cyclic GFR-binding peptide
  MOD_RES (14)..(14): Xaa is C or S
FYLVSIANLKTPAXT

SEQ ID NO: 1866 - protein, 19 aa, Artificial Sequence
  Cyclic GFR-binding peptide
VKPKRGVLYLISIASLAQP

SEQ ID NO: 1867 - protein, 20 aa, Artificial Sequence
  Cyclic GFR-binding peptide
  MOD_RES (14)..(14): Xaa is C or S
FYLVSIANLKTPAXTPKTVH

SEQ ID NO: 1868 - protein, 17 aa, Artificial Sequence
  Cyclic GFR-binding peptide
  MOD_RES (14)..(15): Xaa is C or S
YYLISTASLDQPVXXPS

SEQ ID NO: 1869 - protein, 27 aa, Artificial Sequence
  Cyclic GFR-binding peptide
  MOD_RES (21)..(22): Xaa is C or S
VKPTRGVLYLISIASLDQPVXXPSASA

SEQ ID NO: 1870 - protein, 16 aa, Artificial Sequence
  Cyclic GFR-binding peptide
  MOD_RES (14)..(15): Xaa is C or S
KYLMSIPSLETPVXXA

SEQ ID NO: 1871 - protein, 16 aa, Artificial Sequence
  Cyclic GFR-binding peptide
VVKDYEDFYLMSIANL

SEQ ID NO: 1872 - protein, 16 aa, Artificial Sequence
  Cyclic GFR-binding peptide
IVNNSSDYYLVSTASL

SEQ ID NO: 1873 - protein, 19 aa, Artificial Sequence
  Cyclic GFR-binding peptide
  MOD_RES (16)..(16): Xaa is C or S
LYLVSIASLQVQTPRXQVN

SEQ ID NO: 1874 - protein, 19 aa, Artificial Sequence
  Cyclic GFR-binding peptide
TPVGMDDFYLVSIANLKTP

SEQ ID NO: 1875 - protein, 18 aa, Artificial Sequence
  Cyclic GFR-binding peptide
VVKENEDKYLMSIPSLET

SEQ ID NO: 1876 - protein, 15 aa, Artificial Sequence
  Cyclic GFR-binding peptide
YYLVSTASLQVQTPR

SEQ ID NO: 1877 - protein, 14 aa, Artificial Sequence
  Cyclic GFR-binding peptide
YYLVSTASLQVQTP

SEQ ID NO: 1878 - protein, 16 aa, Artificial Sequence
  Cyclic GFR-binding peptide
  MOD_RES (14)..(15): Xaa is C or S
FYLVSIANLKTPAXXP

SEQ ID NO: 1879 - protein, 17 aa, Artificial Sequence
  Cyclic GFR-binding peptide
VKPKRGVYYLISTASLA

SEQ ID NO: 1880 - protein, 19 aa, Artificial Sequence
  Cyclic GFR-binding peptide
VKPTRGVYYLISTASLDQP

SEQ ID NO: 1881 - protein, 16 aa, Artificial Sequence
  Cyclic GFR-binding peptide
VKPKRGVLYLISIASL

SEQ ID NO: 1882 - protein, 18 aa, Artificial Sequence
  Cyclic GFR-binding peptide
  MOD_RES (14)..(14): Xaa is C or S
YYLVSTASLKTPAXTPKT

SEQ ID NO: 1883 - protein, 17 aa, Artificial Sequence
  Cyclic GFR-binding peptide
  MOD_RES (14)..(15): Xaa is C or S
YYLMSTASLETPVXXAK

SEQ ID NO: 1884 - protein, 13 aa, Artificial Sequence
  Cyclic GFR-binding peptide
KYLMSIPSLETPV

SEQ ID NO: 1885 - protein, 17 aa, Artificial Sequence
  Cyclic GFR-binding peptide
FIPKKRVIELYLVSIAS

SEQ ID NO: 1886 - protein, 16 aa, Artificial Sequence
  Cyclic GFR-binding peptide
VKPTRGVFYLISIANL

SEQ ID NO: 1887 - protein, 16 aa, Artificial Sequence
  Cyclic GFR-binding peptide
  MOD_RES (16)..(16): Xaa is C or S
KYLVSIPSLQVQTPRX

SEQ ID NO: 1888 - protein, 16 aa, Artificial Sequence
  Cyclic GFR-binding peptide
VVKDYEDLYLMSIASL

SEQ ID NO: 1889 - protein, 27 aa, Artificial Sequence
  Cyclic GFR-binding peptide
  MOD_RES (21)..(21): Xaa is C or S
IVNSSDDKYLVSIPSLKTPAXTPKTVH

SEQ ID NO: 1890 - protein, 13 aa, Artificial Sequence
  Cyclic GFR-binding peptide
FYLVSIANLKTPV

SEQ ID NO: 1891 - protein, 17 aa, Artificial Sequence
  Cyclic GFR-binding peptide
VVKDYEDFYLMSIANLE

SEQ ID NO: 1892 - protein, 14 aa, Artificial Sequence
  Cyclic GFR-binding peptide
  MOD_RES (14)..(14): Xaa is C or S
KYLISIPSLDQSVX

SEQ ID NO: 1893 - protein, 19 aa, Artificial Sequence
  Cyclic GFR-binding peptide
  MOD_RES (14)..(15): Xaa is C or S
FYLVSIANLKTPAXXAKPV

SEQ ID NO: 1894 - protein, 18 aa, Artificial Sequence
  Cyclic GFR-binding peptide
VKPTRGVKYLISIPSLDQ

SEQ ID NO: 1895 - protein, 27 aa, Artificial Sequence
  Cyclic GFR-binding peptide
  MOD_RES (21)..(22): Xaa is C or S
IVNSSDDFYLVSIANLQTPAXXPKPVT

SEQ ID NO: 1896 - protein, 18 aa, Artificial Sequence
  Cyclic GFR-binding peptide
IVNSSDDLYLVSIASLKT

SEQ ID NO: 1897 - protein, 14 aa, Artificial Sequence
  Cyclic GFR-binding peptide
  MOD_RES (14)..(14): Xaa is C or S
LYLVSIASLKTPAX

SEQ ID NO: 1898 - protein, 15 aa, Artificial Sequence
  Cyclic GFR-binding peptide
IVNNSSDKYLVSIPS

SEQ ID NO: 1899 - protein, 16 aa, Artificial Sequence
  Cyclic GFR-binding peptide
  MOD_RES (16)..(16): Xaa is C or S
FYLVSIANLQVQTPRX

SEQ ID NO: 1900 - protein, 19 aa, Artificial Sequence
  Cyclic GFR-binding peptide
  MOD_RES (14)..(15): Xaa is C or S
LYLVSIASLKTPAXXPKPV

SEQ ID NO: 1901 - protein, 19 aa, Artificial Sequence
  Cyclic GFR-binding peptide
  MOD_RES (14)..(15): Xaa is C or S
FYLMSIANLETPVXXAKPI

SEQ ID NO: 1902 - protein, 17 aa, Artificial Sequence
  Cyclic GFR-binding peptide
  MOD_RES (14)..(15): Xaa is C or S
LYLISIASLDQPVXXPS

SEQ ID NO: 1903 - protein, 17 aa, Artificial Sequence
  Cyclic GFR-binding peptide
VVKDYEDLYLMSIASLE

SEQ ID NO: 1904 - protein, 15 aa, Artificial Sequence
  Cyclic GFR-binding peptide
VVKDYEDKYLMSIPS

SEQ ID NO: 1905 - protein, 27 aa, Artificial Sequence
  Cyclic GFR-binding peptide
  MOD_RES (21)..(22): Xaa is C or S
IVNSSDDFYLVSIANLKTPAXXPKPVY

SEQ ID NO: 1906 - protein, 14 aa, Artificial Sequence
  Cyclic GFR-binding peptide
  MOD_RES (14)..(14): Xaa is C or S
YYLVSTASLKTPVX

SEQ ID NO: 1907 - protein, 20 aa, Artificial Sequence
  Cyclic GFR-binding peptide
  MOD_RES (14)..(15): Xaa is C or S
KYLMSIPSLETPVXXAKPIS

SEQ ID NO: 1908 - protein, 27 aa, Artificial Sequence
  Cyclic GFR-binding peptide
  MOD_RES (21)..(22): Xaa is C or S
IVNSSDDLYLVSIASLQTPAXXPKPVT

SEQ ID NO: 1909 - protein, 19 aa, Artificial Sequence
  Cyclic GFR-binding peptide
  MOD_RES (14)..(15): Xaa is C or S
FYLISIANLDQPVXXPSAS

SEQ ID NO: 1910 - protein, 20 aa, Artificial Sequence
  Cyclic GFR-binding peptide
  MOD_RES (14)..(15): Xaa is C or S
FYLMSIANLETPVXXAKPIS

SEQ ID NO: 1911 - protein, 19 aa, Artificial Sequence
  Cyclic GFR-binding peptide
  MOD_RES (14)..(15): Xaa is C or S
LYLVSIASLKTPVXXAKGV

SEQ ID NO: 1912 - protein, 18 aa, Artificial Sequence
  Cyclic GFR-binding peptide
TPVGMDDKYLVSIPSLKT

SEQ ID NO: 1913 - protein, 19 aa, Artificial Sequence
  Cyclic GFR-binding peptide
  MOD_RES (14)..(15): Xaa is C or S
KYLVSIPSLKTPAXXAKPV

SEQ ID NO: 1914 - protein, 18 aa, Artificial Sequence
  Cyclic GFR-binding peptide
IVNSSDDLYLVSIASLQT

SEQ ID NO: 1915 - protein, 20 aa, Artificial Sequence
  Cyclic GFR-binding peptide
  MOD_RES (14)..(15): Xaa is C or S
FYLVSIANLKTPAXXPKPVY

SEQ ID NO: 1916 - protein, 17 aa, Artificial Sequence
  Cyclic GFR-binding peptide
IVNNSSDLYLVSIASLK

SEQ ID NO: 1917 - protein, 16 aa, Artificial Sequence
  Cyclic GFR-binding peptide
  MOD_RES (14)..(15): Xaa is C or S
FYLMSIANLETPVXXA

SEQ ID NO: 1918 - protein, 17 aa, Artificial Sequence
  Cyclic GFR-binding peptide
  MOD_RES (14)..(15): Xaa is C or S
YYLISTASLAQPVXXPA

SEQ ID NO: 1919 - protein, 19 aa, Artificial Sequence
  Cyclic GFR-binding peptide
TPVGMDDLYLVSIASLKTP

SEQ ID NO: 1920 - protein, 15 aa, Artificial Sequence
  Cyclic GFR-binding peptide
  MOD_RES (14)..(15): Xaa is C or S
LYLISIASLDQPVXX

SEQ ID NO: 1921 - protein, 27 aa, Artificial Sequence
  Cyclic GFR-binding peptide
  MOD_RES (21)..(22): Xaa is C or S
IVNSSDDLYLVSIASLKTPAXXPKPVY

SEQ ID NO: 1922 - protein, 19 aa, Artificial Sequence
  Cyclic GFR-binding peptide
  MOD_RES (14)..(15): Xaa is C or S
KYLISIPSLDQPVXXPSAS

SEQ ID NO: 1923 - protein, 17 aa, Artificial Sequence
  Cyclic GFR-binding peptide
  MOD_RES (14)..(15): Xaa is C or S
LYLVSIASLKTPVXXAK

SEQ ID NO: 1924 - protein, 19 aa, Artificial Sequence
  Cyclic GFR-binding peptide
IKPTKGIKYLISIPSLDQS

SEQ ID NO: 1925 - protein, 20 aa, Artificial Sequence
  Cyclic GFR-binding peptide
  MOD_RES (14)..(15): Xaa is C or S
LYLVSIASLKTPAXXAKPVA

SEQ ID NO: 1926 - protein, 19 aa, Artificial Sequence
  Cyclic GFR-binding peptide
IVNSSDDLYLVSIASLQTP

SEQ ID NO: 1927 - protein, 18 aa, Artificial Sequence
  Cyclic GFR-binding peptide
VKPTRGVFYLISIANLDQ

SEQ ID NO: 1928 - protein, 19 aa, Artificial Sequence
  Cyclic GFR-binding peptide
TPVGMDDYYLVSTASLKTP

SEQ ID NO: 1929 - protein, 17 aa, Artificial Sequence
  Cyclic GFR-binding peptide
VVKDYEDKYLMSIPSLE

SEQ ID NO: 1930 - protein, 13 aa, Artificial Sequence
  Cyclic GFR-binding peptide
LYLMSIASLETPV

SEQ ID NO: 1931 - protein, 20 aa, Artificial Sequence
  Cyclic GFR-binding peptide
  MOD_RES (14)..(15): Xaa is C or S
KYLVSIPSLKTPAXXPKPVY

SEQ ID NO: 1932 - protein, 16 aa, Artificial Sequence
  Cyclic GFR-binding peptide
IVNNSSDFYLVSIANL

SEQ ID NO: 1933 - protein, 16 aa, Artificial Sequence
  Cyclic GFR-binding peptide
  MOD_RES (14)..(15): Xaa is C or S
FYLVSIANLKTPAXXA

SEQ ID NO: 1934 - protein, 16 aa, Artificial Sequence
  Cyclic GFR-binding peptide
  MOD_RES (14)..(14): Xaa is C or S
YYLVSTASLKTPAXTP

SEQ ID NO: 1935 - protein, 17 aa, Artificial Sequence
  Cyclic GFR-binding peptide
  MOD_RES (14)..(15): Xaa is C or S
LYLISIASLAQPVXXPA

SEQ ID NO: 1936 - protein, 20 aa, Artificial Sequence
  Cyclic GFR-binding peptide
FIPKKRVIEYYLVSTASLQV

SEQ ID NO: 1937 - protein, 19 aa, Artificial Sequence
  Cyclic GFR-binding peptide
FIPKKRVIEKYLVSIPSLQ

SEQ ID NO: 1938 - protein, 19 aa, Artificial Sequence
  Cyclic GFR-binding peptide
VKPTRGVFYLISIANLDQP

SEQ ID NO: 1939 - protein, 15 aa, Artificial Sequence
  Cyclic GFR-binding peptide
  MOD_RES (14)..(15): Xaa is C or S
LYLVSIASLKTPVXX

SEQ ID NO: 1940 - protein, 16 aa, Artificial Sequence
  Cyclic GFR-binding peptide
  MOD_RES (14)..(14): Xaa is C or S
LYLVSIASLKTPAXTP

SEQ ID NO: 1941 - protein, 20 aa, Artificial Sequence
  Cyclic GFR-binding peptide
FIPKKRVIEFYLVSIANLQV

SEQ ID NO: 1942 - protein, 15 aa, Artificial Sequence
  Cyclic GFR-binding peptide
IVNNSSDLYLVSIAS

SEQ ID NO: 1943 - protein, 14 aa, Artificial Sequence
  Cyclic GFR-binding peptide
  MOD_RES (14)..(14): Xaa is C or S
LYLISIASLDQSVX

SEQ ID NO: 1944 - protein, 15 aa, Artificial Sequence
  Cyclic GFR-binding peptide
  MOD_RES (14)..(15): Xaa is C or S
FYLVSIANLKTPVXX

SEQ ID NO: 1945 - protein, 19 aa, Artificial Sequence
  Cyclic GFR-binding peptide
  MOD_RES (14)..(15): Xaa is C or S
YYLVSTASLKTPVXXAKGV

SEQ ID NO: 1946 - protein, 16 aa, Artificial Sequence
  Cyclic GFR-binding peptide
  MOD_RES (14)..(14): Xaa is C or S
FYLVSIANLKTPAXTP

SEQ ID NO: 1947 - protein, 16 aa, Artificial Sequence
  Cyclic GFR-binding peptide
VKPTRGVLYLISIASL

SEQ ID NO: 1948 - protein, 19 aa, Artificial Sequence
  Cyclic GFR-binding peptide
  MOD_RES (14)..(15): Xaa is C or S
FYLVSIANLQTPAXXPKPV

SEQ ID NO: 1949 - protein, 17 aa, Artificial Sequence
  Cyclic GFR-binding peptide
IKPTKGIKYLISIPSLD

SEQ ID NO: 1950 - protein, 20 aa, Artificial Sequence
  Cyclic GFR-binding peptide
  MOD_RES (14)..(15): Xaa is C or S
YYLISTASLDQPVXXPSASA

SEQ ID NO: 1951 - protein, 17 aa, Artificial Sequence
  Cyclic GFR-binding peptide
  MOD_RES (14)..(15): Xaa is C or S
LYLMSIASLETPVXXAK

SEQ ID NO: 1952 - protein, 16 aa, Artificial Sequence
  Cyclic GFR-binding peptide
  MOD_RES (14)..(15): Xaa is C or S
LYLISIASLDQPVXXP

SEQ ID NO: 1953 - protein, 17 aa, Artificial Sequence
  Cyclic GFR-binding peptide
  MOD_RES (14)..(15): Xaa is C or S
YYLVSTASLKTPAXXPK

SEQ ID NO: 1954 - protein, 15 aa, Artificial Sequence
  Cyclic GFR-binding peptide
  MOD_RES (14)..(15): Xaa is C or S
YYLVSTASLKTPVXX

SEQ ID NO: 1955 - protein, 15 aa, Artificial Sequence
  Cyclic GFR-binding peptide
IVNSSDDYYLVSTAS

SEQ ID NO: 1956 - protein, 20 aa, Artificial Sequence
  Cyclic GFR-binding peptide
  MOD_RES (14)..(15): Xaa is C or S
LYLVSIASLKTPVXXAKGVK

SEQ ID NO: 1957 - protein, 19 aa, Artificial Sequence
  Cyclic GFR-binding peptide
  MOD_RES (14)..(15): Xaa is C or S
KYLVSIPSLQTPAXXPKPV

SEQ ID NO: 1958 - protein, 20 aa, Artificial Sequence
  Cyclic GFR-binding peptide
  MOD_RES (14)..(15): Xaa is C or S
LYLISIASLDQSVXXPSASA

SEQ ID NO: 1959 - protein, 19 aa, Artificial Sequence
  Cyclic GFR-binding peptide
  MOD_RES (14)..(15): Xaa is C or S
FYLVSIANLKTPAXXPKPV

SEQ ID NO: 1960 - protein, 20 aa, Artificial Sequence
  Cyclic GFR-binding peptide
  MOD_RES (14)..(15): Xaa is C or S
FYLVSIANLQTPAXXPKPVT

SEQ ID NO: 1961 - protein, 18 aa, Artificial Sequence
  Cyclic GFR-binding peptide
  MOD_RES (14)..(15): Xaa is C or S
FYLISIANLAQPVXXPAA

SEQ ID NO: 1962 - protein, 17 aa, Artificial Sequence
  Cyclic GFR-binding peptide
VKPKRGVLYLISIASLA

SEQ ID NO: 1963 - protein, 16 aa, Artificial Sequence
  Cyclic GFR-binding peptide
  MOD_RES (14)..(15): Xaa is C or S
KYLVSIPSLKTPAXXA

SEQ ID NO: 1964 - protein, 19 aa, Artificial Sequence
  Cyclic GFR-binding peptide
FIPKKRVIELYLVSIASLQ

SEQ ID NO: 1965 - protein, 16 aa, Artificial Sequence
  Cyclic GFR-binding peptide
  MOD_RES (14)..(14): Xaa is C or S
KYLVSIPSLKTPAXTP

SEQ ID NO: 1966 - protein, 18 aa, Artificial Sequence
  Cyclic GFR-binding peptide
IVNSSDDKYLVSIPSLQT

SEQ ID NO: 1967 - protein, 15 aa, Artificial Sequence
  Cyclic GFR-binding peptide
  MOD_RES (14)..(15): Xaa is C or S
FYLISIANLDQSVXX

SEQ ID NO: 1968 - protein, 27 aa, Artificial Sequence
  Cyclic GFR-binding peptide
  MOD_RES (21)..(22): Xaa is C or S
VVKENEDYYLMSTASLETPVXXAKPIK

SEQ ID NO: 1969 - protein, 19 aa, Artificial Sequence
  Cyclic GFR-binding peptide
VKPKRGVFYLISIANLAQP

SEQ ID NO: 1970 - protein, 19 aa, Artificial Sequence
  Cyclic GFR-binding peptide
VVKENEDYYLMSTASLETP

SEQ ID NO: 1971 - protein, 15 aa, Artificial Sequence
  Cyclic GFR-binding peptide
VKPTRGVLYLISIAS

SEQ ID NO: 1972 - protein, 19 aa, Artificial Sequence
  Cyclic GFR-binding peptide
  MOD_RES (14)..(15): Xaa is C or S
KYLVSIPSLKTPAXXPKPV

SEQ ID NO: 1973 - protein, 17 aa, Artificial Sequence
  Cyclic GFR-binding peptide
  MOD_RES (14)..(14): Xaa is C or S
FYLVSIANLKTPAXTPK

SEQ ID NO: 1974 - protein, 13 aa, Artificial Sequence
  Cyclic GFR-binding peptide
LYLVSIASLKTPV

SEQ ID NO: 1975 - protein, 16 aa, Artificial Sequence
  Cyclic GFR-binding peptide
  MOD_RES (14)..(15): Xaa is C or S
LYLVSIASLKTPAXXP

SEQ ID NO: 1976 - protein, 15 aa, Artificial Sequence
  Cyclic GFR-binding peptide
  MOD_RES (14)..(15): Xaa is C or S
YYLISTASLDQPVXX

SEQ ID NO: 1977 - protein, 20 aa, Artificial Sequence
  Cyclic GFR-binding peptide
FIPKKRVIELYLVSIASLQV

SEQ ID NO: 1978 - protein, 13 aa, Artificial Sequence
  Cyclic GFR-binding peptide
YYLISTASLDQPV

SEQ ID NO: 1979 - protein, 15 aa, Artificial Sequence
  Cyclic GFR-binding peptide
VVKDYEDFYLMSIAN

SEQ ID NO: 1980 - protein, 20 aa, Artificial Sequence
  Cyclic GFR-binding peptide
  MOD_RES (14)..(15): Xaa is C or S
YYLVSTASLKTPVXXAKGVK

SEQ ID NO: 1981 - protein, 15 aa, Artificial Sequence
  Cyclic GFR-binding peptide
VVKENEDLYLMSIAS

SEQ ID NO: 1982 - protein, 27 aa, Artificial Sequence
  Cyclic GFR-binding peptide
  MOD_RES (21)..(21): Xaa is C or S
IVNSSDDLYLVSIASLKTPAXTPKTVH

SEQ ID NO: 1983 - protein, 20 aa, Artificial Sequence
  Cyclic GFR-binding peptide
  MOD_RES (14)..(15): Xaa is C or S
FYLISIANLDQSVXXPSASA

SEQ ID NO: 1984 - protein, 14 aa, Artificial Sequence
  Cyclic GFR-binding peptide
LYLVSIASLQVQTP

SEQ ID NO: 1985 - protein, 18 aa, Artificial Sequence
  Cyclic GFR-binding peptide
TPVGMDDLYLVSIASLKT

SEQ ID NO: 1986 - protein, 16 aa, Artificial Sequence
  Cyclic GFR-binding peptide
IVNSSDDKYLVSIPSL

SEQ ID NO: 1987 - protein, 17 aa, Artificial Sequence
  Cyclic GFR-binding peptide
VKPTRGVYYLISTASLD

SEQ ID NO: 1988 - protein, 16 aa, Artificial Sequence
  Cyclic GFR-binding peptide
VKPKRGVKYLISIPSL

SEQ ID NO: 1989 - protein, 13 aa, Artificial Sequence
  Cyclic GFR-binding peptide
FYLISIANLDQSV

SEQ ID NO: 1990 - protein, 14 aa, Artificial Sequence
  Cyclic GFR-binding peptide
  MOD_RES (14)..(14): Xaa is C or S
LYLVSIASLQTPAX

SEQ ID NO: 1991 - protein, 16 aa, Artificial Sequence
  Cyclic GFR-binding peptide
  MOD_RES (14)..(15): Xaa is C or S
KYLISIPSLDQPVXXP

SEQ ID NO: 1992 - protein, 15 aa, Artificial Sequence
  Cyclic GFR-binding peptide
  MOD_RES (14)..(15): Xaa is C or S
KYLISIPSLDQSVXX

SEQ ID NO: 1993 - protein, 27 aa, Artificial Sequence
  Cyclic GFR-binding peptide
  MOD_RES (21)..(22): Xaa is C or S
IVNSSDDKYLVSIPSLQTPAXXPKPVT

SEQ ID NO: 1994 - protein, 18 aa, Artificial Sequence
  Cyclic GFR-binding peptide
  MOD_RES (14)..(15): Xaa is C or S
FYLISIANLDQPVXXPSA

SEQ ID NO: 1995 - protein, 20 aa, Artificial Sequence
  Cyclic GFR-binding peptide
  MOD_RES (14)..(15): Xaa is C or S
KYLISIPSLDQSVXXPSASA

SEQ ID NO: 1996 - protein, 15 aa, Artificial Sequence
  Cyclic GFR-binding peptide
  MOD_RES (14)..(15): Xaa is C or S
YYLMSTASLETPVXX

SEQ ID NO: 1997 - protein, 17 aa, Artificial Sequence
  Cyclic GFR-binding peptide
  MOD_RES (14)..(14): Xaa is C or S
KYLVSIPSLKTPAXTPK

SEQ ID NO: 1998 - protein, 18 aa, Artificial Sequence
  Cyclic GFR-binding peptide
IVNSSDDKYLVSIPSLKT

SEQ ID NO: 1999 - protein, 19 aa, Artificial Sequence
  Cyclic GFR-binding peptide
IVNSSDDLYLVSIASLKTP

SEQ ID NO: 2000 - protein, 14 aa, Artificial Sequence
  Cyclic GFR-binding peptide
  MOD_RES (14)..(14): Xaa is C or S
YYLISTASLDQSVX

SEQ ID NO: 2001 - protein, 13 aa, Artificial Sequence
  Cyclic GFR-binding peptide
KYLISIPSLDQSV

SEQ ID NO: 2002 - protein, 16 aa, Artificial Sequence
  Cyclic GFR-binding peptide
  MOD_RES (14)..(15): Xaa is C or S
FYLISIANLDQPVXXP

SEQ ID NO: 2003 - protein, 13 aa, Artificial Sequence
  Cyclic GFR-binding peptide
YYLMSTASLETPV

SEQ ID NO: 2004 - protein, 14 aa, Artificial Sequence
  Cyclic GFR-binding peptide
  MOD_RES (14)..(14): Xaa is C or S
YYLVSTASLQTPAX

SEQ ID NO: 2005 - protein, 16 aa, Artificial Sequence
  Cyclic GFR-binding peptide
  MOD_RES (16)..(16): Xaa is C or S
YYLVSTASLQVQTPRX

SEQ ID NO: 2006 - protein, 16 aa, Artificial Sequence
  Cyclic GFR-binding peptide
VVKDYEDKYLMSIPSL

SEQ ID NO: 2007 - protein, 16 aa, Artificial Sequence
  Cyclic GFR-binding peptide
VKPTRGVKYLISIPSL

SEQ ID NO: 2008 - protein, 15 aa, Artificial Sequence
  Cyclic GFR-binding peptide
  MOD_RES (14)..(15): Xaa is C or S
KYLISIPSLAQPVXX

SEQ ID NO: 2009 - protein, 19 aa, Artificial Sequence
  Cyclic GFR-binding peptide
IKPTKGILYLISIASLDQS

SEQ ID NO: 2010 - protein, 18 aa, Artificial Sequence
  Cyclic GFR-binding peptide
IKPTKGIKYLISIPSLDQ

SEQ ID NO: 2011 - protein, 19 aa, Artificial Sequence
  Cyclic GFR-binding peptide
VKPKRGVYYLISTASLAQP

SEQ ID NO: 2012 - protein, 16 aa, Artificial Sequence
  Cyclic GFR-binding peptide
  MOD_RES (14)..(15): Xaa is C or S
KYLVSIPSLQTPAXXP

SEQ ID NO: 2013 - protein, 15 aa, Artificial Sequence
  Cyclic GFR-binding peptide
TPVGMDDFYLVSIAN

SEQ ID NO: 2014 - protein, 18 aa, Artificial Sequence
  Cyclic GFR-binding peptide
IVNNSSDYYLVSTASLKT

SEQ ID NO: 2015 - protein, 19 aa, Artificial Sequence
  Cyclic GFR-binding peptide
FIPKKRVIEFYLVSIANLQ

SEQ ID NO: 2016 - protein, 18 aa, Artificial Sequence
  Cyclic GFR-binding peptide
VVKENEDFYLMSIANLET

SEQ ID NO: 2017 - protein, 17 aa, Artificial Sequence
  Cyclic GFR-binding peptide
IVNSSDDYYLVSTASLQ

SEQ ID NO: 2018 - protein, 16 aa, Artificial Sequence
  Cyclic GFR-binding peptide
  MOD_RES (14)..(15): Xaa is C or S
YYLMSTASLETPVXXA

SEQ ID NO: 2019 - protein, 27 aa, Artificial Sequence
  Cyclic GFR-binding peptide
  MOD_RES (21)..(22): Xaa is C or S
VVKDYEDLYLMSIASLETPVXXAKPIS

SEQ ID NO: 2020 - protein, 19 aa, Artificial Sequence
  Cyclic GFR-binding peptide
  MOD_RES (14)..(15): Xaa is C or S
FYLISIANLDQSVXXPSAS

SEQ ID NO: 2021 - protein, 17 aa, Artificial Sequence
  Cyclic GFR-binding peptide
TPVGMDDYYLVSTASLK

SEQ ID NO: 2022 - protein, 17 aa, Artificial Sequence
  Cyclic GFR-binding peptide
  MOD_RES (14)..(14): Xaa is C or S
YYLVSTASLKTPAXTPK

SEQ ID NO: 2023 - protein, 19 aa, Artificial Sequence
  Cyclic GFR-binding peptide
IKPTKGIFYLISIANLDQS

SEQ ID NO: 2024 - protein, 18 aa, Artificial Sequence
  Cyclic GFR-binding peptide
VVKENEDLYLMSIASLET

SEQ ID NO: 2025 - protein, 17 aa, Artificial Sequence
  Cyclic GFR-binding peptide
IVNSSDDYYLVSTASLK

SEQ ID NO: 2026 - protein, 18 aa, Artificial Sequence
  Cyclic GFR-binding peptide
VKPKRGVFYLISIANLAQ

SEQ ID NO: 2027 - protein, 16 aa, Artificial Sequence
  Cyclic GFR-binding peptide
IKPTKGIFYLISIANL

SEQ ID NO: 2028 - protein, 18 aa, Artificial Sequence
  Cyclic GFR-binding peptide
  MOD_RES (14)..(15): Xaa is C or S
KYLISIPSLAQPVXXPAA

SEQ ID NO: 2029 - protein, 20 aa, Artificial Sequence
  Cyclic GFR-binding peptide
  MOD_RES (14)..(14): Xaa is C or S
YYLVSTASLKTPAXTPKTVH

SEQ ID NO: 2030 - protein, 14 aa, Artificial Sequence
  Cyclic GFR-binding peptide
KYLVSIPSLQVQTP

SEQ ID NO: 2031 - protein, 13 aa, Artificial Sequence
  Cyclic GFR-binding peptide
YYLVSTASLKTPV

SEQ ID NO: 2032 - protein, 20 aa, Artificial Sequence
  Cyclic GFR-binding peptide
  MOD_RES (14)..(15): Xaa is C or S
LYLVSIASLKTPAXXPKPVY

SEQ ID NO: 2033 - protein, 16 aa, Artificial Sequence
  Cyclic GFR-binding peptide
  MOD_RES (14)..(15): Xaa is C or S
FYLISIANLAQPVXXP

SEQ ID NO: 2034 - protein, 20 aa, Artificial Sequence
  Cyclic GFR-binding peptide
  MOD_RES (14)..(15): Xaa is C or S
LYLMSIASLETPVXXAKPIS

SEQ ID NO: 2035 - protein, 18 aa, Artificial Sequence
  Cyclic GFR-binding peptide
VKPKRGVLYLISIASLAQ

SEQ ID NO: 2036 - protein, 14 aa, Artificial Sequence
  Cyclic GFR-binding peptide
  MOD_RES (14)..(14): Xaa is C or S
KYLVSIPSLKTPAX

SEQ ID NO: 2037 - protein, 15 aa, Artificial Sequence
  Cyclic GFR-binding peptide
  MOD_RES (14)..(15): Xaa is C or S
LYLISIASLDQSVXX

SEQ ID NO: 2038 - protein, 27 aa, Artificial Sequence
  Cyclic GFR-binding peptide
  MOD_RES (21)..(22): Xaa is C or S
VKPTRGVYYLISTASLDQPVXXPSASA

SEQ ID NO: 2039 - protein, 15 aa, Artificial Sequence
  Cyclic GFR-binding peptide
VKPKRGVKYLISIPS

SEQ ID NO: 2040 - protein, 15 aa, Artificial Sequence
  Cyclic GFR-binding peptide
  MOD_RES (14)..(15): Xaa is C or S
YYLVSTASLKTPAXX

SEQ ID NO: 2041 - protein, 20 aa, Artificial Sequence
  Cyclic GFR-binding peptide
  MOD_RES (14)..(15): Xaa is C or S
FYLVSIANLKTPVXXAKGVK

SEQ ID NO: 2042 - protein, 18 aa, Artificial Sequence
  Cyclic GFR-binding peptide
  MOD_RES (14)..(15): Xaa is C or S
KYLVSIPSLQTPAXXPKP

SEQ ID NO: 2043 - protein, 18 aa, Artificial Sequence
  Cyclic GFR-binding peptide
VVKDYEDYYLMSTASLET

SEQ ID NO: 2044 - protein, 13 aa, Artificial Sequence
  Cyclic GFR-binding peptide
KYLVSIPSLQTPA

SEQ ID NO: 2045 - protein, 27 aa, Artificial Sequence
  Cyclic GFR-binding peptide
  MOD_RES (21)..(22): Xaa is C or S
VKPTRGVKYLISIPSLDQPVXXPSASA

SEQ ID NO: 2046 - protein, 18 aa, Artificial Sequence
  Cyclic GFR-binding peptide
FIPKKRVIEYYLVSTASL

SEQ ID NO: 2047 - protein, 18 aa, Artificial Sequence
  Cyclic GFR-binding peptide
  MOD_RES (14)..(15): Xaa is C or S
YYLISTASLDQSVXXPSA

SEQ ID NO: 2048 - protein, 19 aa, Artificial Sequence
  Cyclic GFR-binding peptide
IVNNSSDKYLVSIPSLKTP

SEQ ID NO: 2049 - protein, 19 aa, Artificial Sequence
  Cyclic GFR-binding peptide
VVKDYEDKYLMSIPSLETP

SEQ ID NO: 2050 - protein, 19 aa, Artificial Sequence
  Cyclic GFR-binding peptide
  MOD_RES (14)..(15): Xaa is C or S
LYLMSIASLETPVXXAKPI

SEQ ID NO: 2051 - protein, 18 aa, Artificial Sequence
  Cyclic GFR-binding peptide
  MOD_RES (14)..(15): Xaa is C or S
YYLMSTASLETPVXXAKP

SEQ ID NO: 2052 - protein, 17 aa, Artificial Sequence
  Cyclic GFR-binding peptide
  MOD_RES (14)..(15): Xaa is C or S
KYLVSIPSLKTPAXXAK

SEQ ID NO: 2053 - protein, 14 aa, Artificial Sequence
  Cyclic GFR-binding peptide
  MOD_RES (14)..(14): Xaa is C or S
YYLISTASLAQPVX

SEQ ID NO: 2054 - protein, 13 aa, Artificial Sequence
  Cyclic GFR-binding peptide
YYLVSTASLKTPA

SEQ ID NO: 2055 - protein, 13 aa, Artificial Sequence
  Cyclic GFR-binding peptide
KYLISIPSLAQPV

SEQ ID NO: 2056 - protein, 20 aa, Artificial Sequence
  Cyclic GFR-binding peptide
  MOD_RES (14)..(15): Xaa is C or S
YYLISTASLAQPVXXPAASA

SEQ ID NO: 2057 - protein, 13 aa, Artificial Sequence
  Cyclic GFR-binding peptide
YYLVSTASLQVQT

SEQ ID NO: 2058 - protein, 15 aa, Artificial Sequence
  Cyclic GFR-binding peptide
  MOD_RES (14)..(15): Xaa is C or S
KYLVSIPSLQTPAXX

SEQ ID NO: 2059 - protein, 19 aa, Artificial Sequence
  Cyclic GFR-binding peptide
  MOD_RES (14)..(15): Xaa is C or S
LYLISIASLAQPVXXPAAS

SEQ ID NO: 2060 - protein, 15 aa, Artificial Sequence
  Cyclic GFR-binding peptide
  MOD_RES (14)..(15): Xaa is C or S
FYLMSIANLETPVXX

SEQ ID NO: 2061 - protein, 16 aa, Artificial Sequence
  Cyclic GFR-binding peptide
VVKENEDYYLMSTASL

SEQ ID NO: 2062 - protein, 27 aa, Artificial Sequence
  Cyclic GFR-binding peptide
  MOD_RES (21)..(22): Xaa is C or S
IVNSSDDYYLVSTASLKTPAXXPKPVY

SEQ ID NO: 2063 - protein, 18 aa, Artificial Sequence
  Cyclic GFR-binding peptide
  MOD_RES (14)..(15): Xaa is C or S
YYLVSTASLKTPAXXPKP

SEQ ID NO: 2064 - protein, 14 aa, Artificial Sequence
  Cyclic GFR-binding peptide
  MOD_RES (14)..(14): Xaa is C or S
KYLISIPSLDQPVX

SEQ ID NO: 2065 - protein, 20 aa, Artificial Sequence
  Cyclic GFR-binding peptide
  MOD_RES (14)..(15): Xaa is C or S
LYLISIASLDQPVXXPSASA

SEQ ID NO: 2066 - protein, 19 aa, Artificial Sequence
  Cyclic GFR-binding peptide
  MOD_RES (14)..(14): Xaa is C or S
KYLVSIPSLKTPAXTPKTV

SEQ ID NO: 2067 - protein, 15 aa, Artificial Sequence
  Cyclic GFR-binding peptide
  MOD_RES (14)..(14): Xaa is C or S
LYLVSIASLKTPAXT

SEQ ID NO: 2068 - protein, 18 aa, Artificial Sequence
  Cyclic GFR-binding peptide
IVNSSDDFYLVSIANLQT

SEQ ID NO: 2069 - protein, 18 aa, Artificial Sequence
  Cyclic GFR-binding peptide
  MOD_RES (14)..(15): Xaa is C or S
KYLVSIPSLKTPAXXAKP

SEQ ID NO: 2070 - protein, 27 aa, Artificial Sequence
  Cyclic GFR-binding peptide
  MOD_RES (21)..(22): Xaa is C or S
VKPKRGVYYLISTASLAQPVXXPAASA

SEQ ID NO: 2071 - protein, 15 aa, Artificial Sequence
  Cyclic GFR-binding peptide
  MOD_RES (14)..(15): Xaa is C or S
KYLISIPSLDQPVXX

SEQ ID NO: 2072 - protein, 15 aa, Artificial Sequence
  Cyclic GFR-binding peptide
KYLVSIPSLQVQTPR

SEQ ID NO: 2073 - protein, 17 aa, Artificial Sequence
  Cyclic GFR-binding peptide
  MOD_RES (16)..(16): Xaa is C or S
FYLVSIANLQVQTPRXQ

SEQ ID NO: 2074 - protein, 13 aa, Artificial Sequence
  Cyclic GFR-binding peptide
FYLMSIANLETPV

SEQ ID NO: 2075 - protein, 19 aa, Artificial Sequence
  Cyclic GFR-binding peptide
  MOD_RES (14)..(15): Xaa is C or S
YYLVSTASLKTPAXXPKPV

SEQ ID NO: 2076 - protein, 20 aa, Artificial Sequence
  Cyclic GFR-binding peptide
  MOD_RES (14)..(15): Xaa is C or S
KYLISIPSLAQPVXXPAASA

SEQ ID NO: 2077 - protein, 18 aa, Artificial Sequence
  Cyclic GFR-binding peptide
  MOD_RES (14)..(15): Xaa is C or S
YYLVSTASLQTPAXXPKP

SEQ ID NO: 2078 - protein, 18 aa, Artificial Sequence
  Cyclic GFR-binding peptide
VKPTRGVLYLISIASLDQ

SEQ ID NO: 2079 - protein, 20 aa, Artificial Sequence
  Cyclic GFR-binding peptide
  MOD_RES (14)..(15): Xaa is C or S
KYLMSIPSLETPVXXAKPIK

SEQ ID NO: 2080 - protein, 18 aa, Artificial Sequence
  Cyclic GFR-binding peptide
IVNSSDDFYLVSIANLKT

SEQ ID NO: 2081 - protein, 17 aa, Artificial Sequence
  Cyclic GFR-binding peptide
  MOD_RES (14)..(15): Xaa is C or S
YYLVSTASLQTPAXXPK

SEQ ID NO: 2082 - protein, 15 aa, Artificial Sequence
  Cyclic GFR-binding peptide
VKPTRGVYYLISTAS

SEQ ID NO: 2083 - protein, 16 aa, Artificial Sequence
  Cyclic GFR-binding peptide
IVNNSSDLYLVSIASL

SEQ ID NO: 2084 - protein, 20 aa, Artificial Sequence
  Cyclic GFR-binding peptide
  MOD_RES (14)..(15): Xaa is C or S
YYLISTASLDQSVXXPSASA

SEQ ID NO: 2085 - protein, 15 aa, Artificial Sequence
  Cyclic GFR-binding peptide
VKPKRGVLYLISIAS

SEQ ID NO: 2086 - protein, 17 aa, Artificial Sequence
  Cyclic GFR-binding peptide
VVKENEDYYLMSTASLE

SEQ ID NO: 2087 - protein, 16 aa, Artificial Sequence
  Cyclic GFR-binding peptide
  MOD_RES (14)..(15): Xaa is C or S
YYLVSTASLKTPVXXA

SEQ ID NO: 2088 - protein, 16 aa, Artificial Sequence
  Cyclic GFR-binding peptide
IVNSSDDYYLVSTASL

SEQ ID NO: 2089 - protein, 20 aa, Artificial Sequence
  Cyclic GFR-binding peptide
  MOD_RES (14)..(15): Xaa is C or S
YYLMSTASLETPVXXAKPIK

SEQ ID NO: 2090 - protein, 17 aa, Artificial Sequence
  Cyclic GFR-binding peptide
  MOD_RES (14)..(15): Xaa is C or S
KYLVSIPSLKTPAXXPK

SEQ ID NO: 2091 - protein, 17 aa, Artificial Sequence
  Cyclic GFR-binding peptide
  MOD_RES (14)..(15): Xaa is C or S
KYLVSIPSLQTPAXXPK

SEQ ID NO: 2092 - protein, 15 aa, Artificial Sequence
  Cyclic GFR-binding peptide
IVNNSSDYYLVSTAS

SEQ ID NO: 2093 - protein, 16 aa, Artificial Sequence
  Cyclic GFR-binding peptide
TPVGMDDYYLVSTASL

SEQ ID NO: 2094 - protein, 16 aa, Artificial Sequence
  Cyclic GFR-binding peptide
  MOD_RES (14)..(15): Xaa is C or S
FYLISIANLDQSVXXP

SEQ ID NO: 2095 - protein, 16 aa, Artificial Sequence
  Cyclic GFR-binding peptide
VKPKRGVFYLISIANL

SEQ ID NO: 2096 - protein, 14 aa, Artificial Sequence
  Cyclic GFR-binding peptide
  MOD_RES (14)..(14): Xaa is C or S
YYLISTASLDQPVX

SEQ ID NO: 2097 - protein, 14 aa, Artificial Sequence
  Cyclic GFR-binding peptide
  MOD_RES (14)..(14): Xaa is C or S
KYLISIPSLAQPVX

SEQ ID NO: 2098 - protein, 18 aa, Artificial Sequence
  Cyclic GFR-binding peptide
  MOD_RES (16)..(16): Xaa is C or S
KYLVSIPSLQVQTPRXQV

SEQ ID NO: 2099 - protein, 29 aa, Artificial Sequence
  Cyclic GFR-binding peptide
  MOD_RES (25)..(25): Xaa is C or S
FIPKKRVIEYYLVSTASLQVQTPRXQVNR

SEQ ID NO: 2100 - protein, 18 aa, Artificial Sequence
  Cyclic GFR-binding peptide
VKPKRGVKYLISIPSLAQ

SEQ ID NO: 2101 - protein, 14 aa, Artificial Sequence
  Cyclic GFR-binding peptide
  MOD_RES (14)..(14): Xaa is C or S
FYLMSIANLETPVX

SEQ ID NO: 2102 - protein, 13 aa, Artificial Sequence
  Cyclic GFR-binding peptide
KYLVSIPSLQVQT

SEQ ID NO: 2103 - protein, 17 aa, Artificial Sequence
  Cyclic GFR-binding peptide
  MOD_RES (14)..(15): Xaa is C or S
LYLISIASLDQSVXXPS

SEQ ID NO: 2104 - protein, 20 aa, Artificial Sequence
  Cyclic GFR-binding peptide
  MOD_RES (16)..(16): Xaa is C or S
KYLVSIPSLQVQTPRXQVNR

SEQ ID NO: 2105 - protein, 20 aa, Artificial Sequence
  Cyclic GFR-binding peptide
  MOD_RES (14)..(15): Xaa is C or S
FYLISIANLDQPVXXPSASA

SEQ ID NO: 2106 - protein, 18 aa, Artificial Sequence
  Cyclic GFR-binding peptide
  MOD_RES (14)..(14): Xaa is C or S
KYLVSIPSLKTPAXTPKT

SEQ ID NO: 2107 - protein, 18 aa, Artificial Sequence
  Cyclic GFR-binding peptide
  MOD_RES (14)..(15): Xaa is C or S
KYLVSIPSLKTPAXXPKP

SEQ ID NO: 2108 - protein, 15 aa, Artificial Sequence
  Cyclic GFR-binding peptide
VVKDYEDLYLMSIAS

SEQ ID NO: 2109 - protein, 14 aa, Artificial Sequence
  Cyclic GFR-binding peptide
  MOD_RES (14)..(14): Xaa is C or S
FYLVSIANLKTPVX

SEQ ID NO: 2110 - protein, 16 aa, Artificial Sequence
  Cyclic GFR-binding peptide
IVNNSSDKYLVSIPSL

SEQ ID NO: 2111 - protein, 15 aa, Artificial Sequence
  Cyclic GFR-binding peptide
  MOD_RES (14)..(15): Xaa is C or S
YYLVSTASLQTPAXX

SEQ ID NO: 2112 - protein, 17 aa, Artificial Sequence
  Cyclic GFR-binding peptide
IKPTKGIYYLISTASLD

SEQ ID NO: 2113 - protein, 14 aa, Artificial Sequence
  Cyclic GFR-binding peptide
  MOD_RES (14)..(14): Xaa is C or S
LYLVSIASLKTPVX

SEQ ID NO: 2114 - protein, 15 aa, Artificial Sequence
  Cyclic GFR-binding peptide
VVKENEDFYLMSIAN

SEQ ID NO: 2115 - protein, 19 aa, Artificial Sequence
  Cyclic GFR-binding peptide
IVNSSDDYYLVSTASLQTP

SEQ ID NO: 2116 - protein, 15 aa, Artificial Sequence
  Cyclic GFR-binding peptide
IKPTKGIKYLISIPS

SEQ ID NO: 2117 - protein, 19 aa, Artificial Sequence
  Cyclic GFR-binding peptide
IVNSSDDYYLVSTASLKTP

SEQ ID NO: 2118 - protein, 18 aa, Artificial Sequence
  Cyclic GFR-binding peptide
IKPTKGIFYLISIANLDQ

SEQ ID NO: 2119 - protein, 20 aa, Artificial Sequence
  Cyclic GFR-binding peptide
  MOD_RES (14)..(14): Xaa is C or S
KYLVSIPSLKTPAXTPKTVH

SEQ ID NO: 2120 - protein, 13 aa, Artificial Sequence
  Cyclic GFR-binding peptide
KYLVSIPSLKTPA

SEQ ID NO: 2121 - protein, 18 aa, Artificial Sequence
  Cyclic GFR-binding peptide
TPVGMDDFYLVSIANLKT

SEQ ID NO: 2122 - protein, 19 aa, Artificial Sequence
  Cyclic GFR-binding peptide
  MOD_RES (14)..(14): Xaa is C or S
YYLVSTASLKTPAXTPKTV

SEQ ID NO: 2123 - protein, 16 aa, Artificial Sequence
  Cyclic GFR-binding peptide
  MOD_RES (14)..(15): Xaa is C or S
LYLISIASLDQSVXXP

SEQ ID NO: 2124 - protein, 18 aa, Artificial Sequence
  Cyclic GFR-binding peptide
FIPKKRVIELYLVSIASL

SEQ ID NO: 2125 - protein, 13 aa, Artificial Sequence
  Cyclic GFR-binding peptide
YYLVSTASLQTPA

SEQ ID NO: 2126 - protein, 19 aa, Artificial Sequence
  Cyclic GFR-binding peptide
IVNNSSDLYLVSIASLKTP

SEQ ID NO: 2127 - protein, 19 aa, Artificial Sequence
  Cyclic GFR-binding peptide
  MOD_RES (16)..(16): Xaa is C or S
KYLVSIPSLQVQTPRXQVN

SEQ ID NO: 2128 - protein, 27 aa, Artificial Sequence
  Cyclic GFR-binding peptide
  MOD_RES (21)..(21): Xaa is C or S
IVNSSDDYYLVSTASLKTPAXTPKTVH

SEQ ID NO: 2129 - protein, 17 aa, Artificial Sequence
  Cyclic GFR-binding peptide
IVNNSSDKYLVSIPSLK

SEQ ID NO: 2130 - protein, 27 aa, Artificial Sequence
  Cyclic GFR-binding peptide
  MOD_RES (21)..(22): Xaa is C or S
IKPTKGIYYLISTASLDQSVXXPSASA

SEQ ID NO: 2131 - protein, 17 aa, Artificial Sequence
  Cyclic GFR-binding peptide
  MOD_RES (14)..(15): Xaa is C or S
FYLISIANLDQSVXXPS

SEQ ID NO: 2132 - protein, 14 aa, Artificial Sequence
  Cyclic GFR-binding peptide
  MOD_RES (14)..(14): Xaa is C or S
LYLMSIASLETPVX

SEQ ID NO: 2133 - protein, 19 aa, Artificial Sequence
  Cyclic GFR-binding peptide
VVKDYEDFYLMSIANLETP

SEQ ID NO: 2134 - protein, 15 aa, Artificial Sequence
  Cyclic GFR-binding peptide
NAISILYFIGKTPKI

SEQ ID NO: 2135 - protein, 13 aa, Artificial Sequence
  Cyclic GFR-binding peptide
APTQLSAISVLYL

SEQ ID NO: 2136 - protein, 18 aa, Artificial Sequence
  Cyclic GFR-binding peptide
  MOD_RES (4)..(5): Xaa is C or S
PKAXXVPTELSPISMLYK

SEQ ID NO: 2137 - protein, 21 aa, Artificial Sequence
  Cyclic GFR-binding peptide
QVQLNAISVLYFEIVRKKPIF

SEQ ID NO: 2138 - protein, 15 aa, Artificial Sequence
  Cyclic GFR-binding peptide
SPISVLYKDDSSNVI

SEQ ID NO: 2139 - protein, 27 aa, Artificial Sequence
  Cyclic GFR-binding peptide
  MOD_RES (6)..(7): Xaa is C or S
KVGKAXXVPTKLNAISVLYFDDMGVPT

SEQ ID NO: 2140 - protein, 29 aa, Artificial Sequence
  Cyclic GFR-binding peptide
  MOD_RES (5)..(5): Xaa is C or S
RNVQXRPTQVQLSPISVLYKEIVRKKPIF

SEQ ID NO: 2141 - protein, 18 aa, Artificial Sequence
  Cyclic GFR-binding peptide
  MOD_RES (4)..(5): Xaa is C or S
ASPXXVSQDLSPISILYK

SEQ ID NO: 2142 - protein, 19 aa, Artificial Sequence
  Cyclic GFR-binding peptide
  MOD_RES (5)..(6): Xaa is C or S
SASPXXVSQDLSATSILYY

SEQ ID NO: 2143 - protein, 27 aa, Artificial Sequence
  Cyclic GFR-binding peptide
  MOD_RES (6)..(7): Xaa is C or S
KVGKAXXVPTKLSAISVLYLDDMGVPT

SEQ ID NO: 2144 - protein, 17 aa, Artificial Sequence
  Cyclic GFR-binding peptide
KLSAISVLYLDDSSNVI

SEQ ID NO: 2145 - protein, 19 aa, Artificial Sequence
  Cyclic GFR-binding peptide
  MOD_RES (5)..(6): Xaa is C or S
SASPXXVSQDLSAISILYL

SEQ ID NO: 2146 - protein, 18 aa, Artificial Sequence
  Cyclic GFR-binding peptide
LNAISVLYFEIVRKKPIF

SEQ ID NO: 2147 - protein, 17 aa, Artificial Sequence
  Cyclic GFR-binding peptide
DLSPISILYKVGRTPKV

SEQ ID NO: 2148 - protein, 18 aa, Artificial Sequence
  Cyclic GFR-binding peptide
QALSATSILYYVGRKPKV

SEQ ID NO: 2149 - protein, 13 aa, Artificial Sequence
  Cyclic GFR-binding peptide
VPQALSAISILYL

SEQ ID NO: 2150 - protein, 16 aa, Artificial Sequence
  Cyclic GFR-binding peptide
LNAISVLYFDDMGVPT

SEQ ID NO: 2151 - protein, 16 aa, Artificial Sequence
  Cyclic GFR-binding peptide
  MOD_RES (2)..(3): Xaa is C or S
PXXAPTQLSATSVLYY

SEQ ID NO: 2152 - protein, 15 aa, Artificial Sequence
  Cyclic GFR-binding peptide
SAISILYLIGKTPKI

SEQ ID NO: 2153 - protein, 16 aa, Artificial Sequence
  Cyclic GFR-binding peptide
  MOD_RES (2)..(3): Xaa is C or S
PXXVPQALSATSILYY

SEQ ID NO: 2154 - protein, 17 aa, Artificial Sequence
  Cyclic GFR-binding peptide
ELSPISMLYKDENEKVV

SEQ ID NO: 2155 - protein, 13 aa, Artificial Sequence
  Cyclic GFR-binding peptide
VSQDLSATSILYY

SEQ ID NO: 2156 - protein, 18 aa, Artificial Sequence
  Cyclic GFR-binding peptide
  MOD_RES (4)..(5): Xaa is C or S
ASPXXVPQDLSATSILYY

SEQ ID NO: 2157 - protein, 18 aa, Artificial Sequence
  Cyclic GFR-binding peptide
  MOD_RES (4)..(5): Xaa is C or S
AAPXXVPQALSATSILYY

SEQ ID NO: 2158 - protein, 20 aa, Artificial Sequence
  Cyclic GFR-binding peptide
  MOD_RES (6)..(7): Xaa is C or S
TVPKPXXAPTQLSATSVLYY

SEQ ID NO: 2159 - protein, 18 aa, Artificial Sequence
  Cyclic GFR-binding peptide
  MOD_RES (4)..(5): Xaa is C or S
PKAXXAPTKLNAISVLYF

SEQ ID NO: 2160 - protein, 18 aa, Artificial Sequence
  Cyclic GFR-binding peptide
TELSATSMLYYDENEKVV

SEQ ID NO: 2161 - protein, 20 aa, Artificial Sequence
  Cyclic GFR-binding peptide
  MOD_RES (5)..(5): Xaa is C or S
RNVQXRPTQVQLSATSVLYY

SEQ ID NO: 2162 - protein, 17 aa, Artificial Sequence
  Cyclic GFR-binding peptide
  MOD_RES (2)..(2): Xaa is C or S
QXRPTQVQLSPISVLYK

SEQ ID NO: 2163 - protein, 21 aa, Artificial Sequence
  Cyclic GFR-binding peptide
QVQLSAISVLYLEIVRKKPIF

SEQ ID NO: 2164 - protein, 18 aa, Artificial Sequence
  Cyclic GFR-binding peptide
  MOD_RES (3)..(3): Xaa is C or S
VQXRPTQVQLSAISVLYL

SEQ ID NO: 2165 - protein, 17 aa, Artificial Sequence
  Cyclic GFR-binding peptide
QLSAISVLYLDDSSNVI

SEQ ID NO: 2166 - protein, 18 aa, Artificial Sequence
  Cyclic GFR-binding peptide
TKLNAISVLYFDSSNNVI

SEQ ID NO: 2167 - protein, 16 aa, Artificial Sequence
  Cyclic GFR-binding peptide
LNAISMLYFDENEKVV

SEQ ID NO: 2168 - protein, 16 aa, Artificial Sequence
  Cyclic GFR-binding peptide
  MOD_RES (2)..(3): Xaa is C or S
PXXVPQALSAISILYL

SEQ ID NO: 2169 - protein, 16 aa, Artificial Sequence
  Cyclic GFR-binding peptide
  MOD_RES (2)..(3): Xaa is C or S
PXXAPTQLSAISVLYL

SEQ ID NO: 2170 - protein, 18 aa, Artificial Sequence
  Cyclic GFR-binding peptide
TKLSAISVLYLDSSNNVI

SEQ ID NO: 2171 - protein, 15 aa, Artificial Sequence
  Cyclic GFR-binding peptide
SPISMLYKDENEKVV

SEQ ID NO: 2172 - protein, 17 aa, Artificial Sequence
  Cyclic GFR-binding peptide
  MOD_RES (2)..(2): Xaa is C or S
QXRPTQVQLSAISVLYL

SEQ ID NO: 2173 - protein, 15 aa, Artificial Sequence
  Cyclic GFR-binding peptide
NAISILYFVGRKPKV

SEQ ID NO: 2174 - protein, 16 aa, Artificial Sequence
  Cyclic GFR-binding peptide
LSAISVLYLDDSSNVI

SEQ ID NO: 2175 - protein, 15 aa, Artificial Sequence
  Cyclic GFR-binding peptide
SATSMLYYDEYDKVV

SEQ ID NO: 2176 - protein, 19 aa, Artificial Sequence
  Cyclic GFR-binding peptide
  MOD_RES (5)..(6): Xaa is C or S
VPKPXXAPTQLSATSVLYY

SEQ ID NO: 2177 - protein, 13 aa, Artificial Sequence
  Cyclic GFR-binding peptide
VSQDLSAISILYL

SEQ ID NO: 2178 - protein, 14 aa, Artificial Sequence
  Cyclic GFR-binding peptide
PTQVQLNAISVLYF

SEQ ID NO: 2179 - protein, 29 aa, Artificial Sequence
  Cyclic GFR-binding peptide
  MOD_RES (5)..(5): Xaa is C or S
RNVQXRPTQVQLSAISVLYLEIVRKKPIF

SEQ ID NO: 2180 - protein, 16 aa, Artificial Sequence
  Cyclic GFR-binding peptide
LSATSILYYIGKTPKI

SEQ ID NO: 2181 - protein, 17 aa, Artificial Sequence
  Cyclic GFR-binding peptide
  MOD_RES (3)..(4): Xaa is C or S
SPXXVPQDLNAISILYF

SEQ ID NO: 2182 - protein, 20 aa, Artificial Sequence
  Cyclic GFR-binding peptide
  MOD_RES (6)..(7): Xaa is C or S
AVPKAXXAPTKLNAISVLYF

SEQ ID NO: 2183 - protein, 16 aa, Artificial Sequence
  Cyclic GFR-binding peptide
  MOD_RES (2)..(3): Xaa is C or S
AXXAPTKLSAISVLYL

SEQ ID NO: 2184 - protein, 18 aa, Artificial Sequence
  Cyclic GFR-binding peptide
  MOD_RES (4)..(5): Xaa is C or S
ASPXXVPQDLSAISILYL

SEQ ID NO: 2185 - protein, 15 aa, Artificial Sequence
  Cyclic GFR-binding peptide
  MOD_RES (1)..(2): Xaa is C or S
XXVPQALSAISILYL

SEQ ID NO: 2186 - protein, 18 aa, Artificial Sequence
  Cyclic GFR-binding peptide
  MOD_RES (4)..(5): Xaa is C or S
GKAXXVPTKLSAISVLYL

SEQ ID NO: 2187 - protein, 15 aa, Artificial Sequence
  Cyclic GFR-binding peptide
SATSILYYVGRKPKV

SEQ ID NO: 2188 - protein, 27 aa, Artificial Sequence
  Cyclic GFR-binding peptide
  MOD_RES (6)..(7): Xaa is C or S
KVGKAXXVPTKLSATSVLYYDDMGVPT

SEQ ID NO: 2189 - protein, 18 aa, Artificial Sequence
  Cyclic GFR-binding peptide
  MOD_RES (3)..(3): Xaa is C or S
VQXRPTQVQLSATSVLYY

SEQ ID NO: 2190 - protein, 27 aa, Artificial Sequence
  Cyclic GFR-binding peptide
  MOD_RES (6)..(7): Xaa is C or S
ASAAPXXVPQALSAISILYLVGRKPKV

SEQ ID NO: 2191 - protein, 18 aa, Artificial Sequence
  Cyclic GFR-binding peptide
  MOD_RES (4)..(5): Xaa is C or S
PKAXXVPTELNAISMLYF

SEQ ID NO: 2192 - protein, 13 aa, Artificial Sequence
  Cyclic GFR-binding peptide
VPQALSATSILYY

SEQ ID NO: 2193 - protein, 17 aa, Artificial Sequence
  Cyclic GFR-binding peptide
KLSAISVLYLDDMGVPT

SEQ ID NO: 2194 - protein, 15 aa, Artificial Sequence
  Cyclic GFR-binding peptide
SATSILYYIGKTPKI

SEQ ID NO: 2195 - protein, 18 aa, Artificial Sequence
  Cyclic GFR-binding peptide
TELSPISMLYKDEYDKVV

SEQ ID NO: 2196 - protein, 15 aa, Artificial Sequence
  Cyclic GFR-binding peptide
  MOD_RES (2)..(2): Xaa is C or S
TXAPTKLSATSVLYY

SEQ ID NO: 2197 - protein, 18 aa, Artificial Sequence
  Cyclic GFR-binding peptide
QDLSAISILYLIGKTPKI

SEQ ID NO: 2198 - protein, 16 aa, Artificial Sequence
  Cyclic GFR-binding peptide
LSAISVLYLDDMGVPT

SEQ ID NO: 2199 - protein, 17 aa, Artificial Sequence
  Cyclic GFR-binding peptide
  MOD_RES (2)..(2): Xaa is C or S
QXRPTQVQLSATSVLYY

SEQ ID NO: 2200 - protein, 17 aa, Artificial Sequence
  Cyclic GFR-binding peptide
  MOD_RES (3)..(4): Xaa is C or S
APXXVPQALSPISILYK

SEQ ID NO: 2201 - protein, 29 aa, Artificial Sequence
  Cyclic GFR-binding peptide
  MOD_RES (5)..(5): Xaa is C or S
RNVQXRPTQVQLNAISVLYFEIVRKKPIF

SEQ ID NO: 2202 - protein, 27 aa, Artificial Sequence
  Cyclic GFR-binding peptide
  MOD_RES (6)..(7): Xaa is C or S
SIPKAXXVPTELSPISMLYKDEYDKVV

SEQ ID NO: 2203 - protein, 27 aa, Artificial Sequence
  Cyclic GFR-binding peptide
  MOD_RES (6)..(7): Xaa is C or S
AVPKAXXAPTKLNAISVLYFDSSNNVI

SEQ ID NO: 2204 - protein, 18 aa, Artificial Sequence
  Cyclic GFR-binding peptide
  MOD_RES (4)..(5): Xaa is C or S
GKAXXVPTKLNAISVLYF

SEQ ID NO: 2205 - protein, 20 aa, Artificial Sequence
  Cyclic GFR-binding peptide
  MOD_RES (6)..(7): Xaa is C or S
SIPKAXXVPTELSATSMLYY

SEQ ID NO: 2206 - protein, 27 aa, Artificial Sequence
  Cyclic GFR-binding peptide
  MOD_RES (6)..(7): Xaa is C or S
ASASPXXVSQDLSAISILYLIGKTPKI

SEQ ID NO: 2207 - protein, 17 aa, Artificial Sequence
  Cyclic GFR-binding peptide
DLNAISILYFVGRTPKV

SEQ ID NO: 2208 - protein, 17 aa, Artificial Sequence
  Cyclic GFR-binding peptide
SATSVLYYEIVRKKPIF

SEQ ID NO: 2209 - protein, 15 aa, Artificial Sequence
  Cyclic GFR-binding peptide
  MOD_RES (1)..(2): Xaa is C or S
XXVPQALSATSILYY

SEQ ID NO: 2210 - protein, 17 aa, Artificial Sequence
  Cyclic GFR-binding peptide
  MOD_RES (3)..(4): Xaa is C or S
KAXXVPTELNAISMLYF

SEQ ID NO: 2211 - protein, 17 aa, Artificial Sequence
  Cyclic GFR-binding peptide
  MOD_RES (3)..(4): Xaa is C or S
APXXVPQALNAISILYF

SEQ ID NO: 2212 - protein, 17 aa, Artificial Sequence
  Cyclic GFR-binding peptide
QLSPISVLYKDDSSNVI

SEQ ID NO: 2213 - protein, 20 aa, Artificial Sequence
  Cyclic GFR-binding peptide
  MOD_RES (6)..(7): Xaa is C or S
TVPKPXXAPTQLSAISVLYL

SEQ ID NO: 2214 - protein, 18 aa, Artificial Sequence
  Cyclic GFR-binding peptide
  MOD_RES (4)..(5): Xaa is C or S
AAPXXVPQALSAISILYL

SEQ ID NO: 2215 - protein, 19 aa, Artificial Sequence
  Cyclic GFR-binding peptide
  MOD_RES (5)..(6): Xaa is C or S
VPKPXXAPTQLSAISVLYL

SEQ ID NO: 2216 - protein, 17 aa, Artificial Sequence
  Cyclic GFR-binding peptide
KLSPISVLYKDDSSNVI

SEQ ID NO: 2217 - protein, 18 aa, Artificial Sequence
  Cyclic GFR-binding peptide
QDLSATSILYYVGRTPKV

SEQ ID NO: 2218 - protein, 17 aa, Artificial Sequence
  Cyclic GFR-binding peptide
  MOD_RES (3)..(4): Xaa is C or S
KAXXVPTELSPISMLYK

SEQ ID NO: 2219 - protein, 19 aa, Artificial Sequence
  Cyclic GFR-binding peptide
PTKLNAISVLYFDSSNNVI

SEQ ID NO: 2220 - protein, 14 aa, Artificial Sequence
  Cyclic GFR-binding peptide
  MOD_RES (1)..(1): Xaa is C or S
XVPQALSAISILYL

SEQ ID NO: 2221 - protein, 20 aa, Artificial Sequence
  Cyclic GFR-binding peptide
  MOD_RES (7)..(7): Xaa is C or S
HVTKPTXAPTKLSAISVLYL

SEQ ID NO: 2222 - protein, 20 aa, Artificial Sequence
  Cyclic GFR-binding peptide
  MOD_RES (6)..(7): Xaa is C or S
TVPKPXXAPTQLSPISVLYK

SEQ ID NO: 2223 - protein, 18 aa, Artificial Sequence
  Cyclic GFR-binding peptide
  MOD_RES (4)..(5): Xaa is C or S
ASPXXVPQDLSPISILYK

SEQ ID NO: 2224 - protein, 13 aa, Artificial Sequence
  Cyclic GFR-binding peptide
APTKLSAISVLYL

SEQ ID NO: 2225 - protein, 27 aa, Artificial Sequence
  Cyclic GFR-binding peptide
  MOD_RES (6)..(7): Xaa is C or S
AVPKAXXAPTKLSAISVLYLDSSNNVI

SEQ ID NO: 2226 - protein, 19 aa, Artificial Sequence
  Cyclic GFR-binding peptide
  MOD_RES (5)..(6): Xaa is C or S
SAAPXXVPQALSATSILYY

SEQ ID NO: 2227 - protein, 21 aa, Artificial Sequence
  Cyclic GFR-binding peptide
QVQLSATSVLYYEIVRKKPIF

SEQ ID NO: 2228 - protein, 17 aa, Artificial Sequence
  Cyclic GFR-binding peptide
  MOD_RES (3)..(4): Xaa is C or S
KAXXAPTKLNAISVLYF

SEQ ID NO: 2229 - protein, 17 aa, Artificial Sequence
  Cyclic GFR-binding peptide
  MOD_RES (3)..(4): Xaa is C or S
SPXXVPQDLSPISILYK

SEQ ID NO: 2230 - protein, 27 aa, Artificial Sequence
  Cyclic GFR-binding peptide
  MOD_RES (6)..(7): Xaa is C or S
TVPKPXXAPTQLSATSVLYYDDSSNVI

SEQ ID NO: 2231 - protein, 17 aa, Artificial Sequence
  Cyclic GFR-binding peptide
ELSATSMLYYDEYDKVV

SEQ ID NO: 2232 - protein, 19 aa, Artificial Sequence
  Cyclic GFR-binding peptide
  MOD_RES (5)..(6): Xaa is C or S
SASPXXVPQDLSATSILYY

SEQ ID NO: 2233 - protein, 16 aa, Artificial Sequence
  Cyclic GFR-binding peptide
  MOD_RES (1)..(1): Xaa is C or S
XRPTQVQLSAISVLYL

SEQ ID NO: 2234 - protein, 19 aa, Artificial Sequence
  Cyclic GFR-binding peptide
  MOD_RES (5)..(6): Xaa is C or S
VPKAXXAPTKLSAISVLYL

SEQ ID NO: 2235 - protein, 15 aa, Artificial Sequence
  Cyclic GFR-binding peptide
SAISVLYLDDMGVPT

SEQ ID NO: 2236 - protein, 16 aa, Artificial Sequence
  Cyclic GFR-binding peptide
LSATSILYYVGRKPKV

SEQ ID NO: 2237 - protein, 20 aa, Artificial Sequence
  Cyclic GFR-binding peptide
  MOD_RES (6)..(7): Xaa is C or S
AVPKAXXAPTKLSPISVLYK

SEQ ID NO: 2238 - protein, 16 aa, Artificial Sequence
  Cyclic GFR-binding peptide
  MOD_RES (2)..(3): Xaa is C or S
PXXVPQALSPISILYK

SEQ ID NO: 2239 - protein, 27 aa, Artificial Sequence
  Cyclic GFR-binding peptide
  MOD_RES (6)..(7): Xaa is C or S
SIPKAXXVPTELNAISMLYFDEYDKVV

SEQ ID NO: 2240 - protein, 20 aa, Artificial Sequence
  Cyclic GFR-binding peptide
  MOD_RES (5)..(5): Xaa is C or S
RNVQXRPTQVQLNAISVLYF

SEQ ID NO: 2241 - protein, 19 aa, Artificial Sequence
  Cyclic GFR-binding peptide
PQDLSPISILYKVGRTPKV

SEQ ID NO: 2242 - protein, 16 aa, Artificial Sequence
  Cyclic GFR-binding peptide
  MOD_RES (2)..(3): Xaa is C or S
PXXAPTKLSATSVLYY

SEQ ID NO: 2243 - protein, 19 aa, Artificial Sequence
  Cyclic GFR-binding peptide
  MOD_RES (5)..(6): Xaa is C or S
SASPXXVPQDLSAISILYL

SEQ ID NO: 2244 - protein, 17 aa, Artificial Sequence
  Cyclic GFR-binding peptide
  MOD_RES (3)..(4): Xaa is C or S
KAXXVPTKLNAISVLYF

SEQ ID NO: 2245 - protein, 16 aa, Artificial Sequence
  Cyclic GFR-binding peptide
LSAISILYLIGKTPKI

SEQ ID NO: 2246 - protein, 15 aa, Artificial Sequence
  Cyclic GFR-binding peptide
RPTQVQLNAISVLYF

SEQ ID NO: 2247 - protein, 19 aa, Artificial Sequence
  Cyclic GFR-binding peptide
  MOD_RES (5)..(6): Xaa is C or S
SASPXXVSQDLSPISILYK

SEQ ID NO: 2248 - protein, 27 aa, Artificial Sequence
  Cyclic GFR-binding peptide
  MOD_RES (6)..(7): Xaa is C or S
ASASPXXVSQDLSPISILYKIGKTPKI

SEQ ID NO: 2249 - protein, 17 aa, Artificial Sequence
  Cyclic GFR-binding peptide
  MOD_RES (4)..(4): Xaa is C or S
KPTXAPTKLSAISVLYL

SEQ ID NO: 2250 - protein, 15 aa, Artificial Sequence
  Cyclic GFR-binding peptide
  MOD_RES (1)..(2): Xaa is C or S
XXVPQDLNAISILYF

SEQ ID NO: 2251 - protein, 27 aa, Artificial Sequence
  Cyclic GFR-binding peptide
  MOD_RES (6)..(7): Xaa is C or S
KIPKAXXVPTELSPISMLYKDENEKVV

SEQ ID NO: 2252 - protein, 19 aa, Artificial Sequence
  Cyclic GFR-binding peptide
PTKLSPISVLYKDDSSNVI

SEQ ID NO: 2253 - protein, 14 aa, Artificial Sequence
  Cyclic GFR-binding peptide
  MOD_RES (1)..(1): Xaa is C or S
XVPTELSPISMLYK

SEQ ID NO: 2254 - protein, 17 aa, Artificial Sequence
  Cyclic GFR-binding peptide
  MOD_RES (3)..(4): Xaa is C or S
SPXXVSQDLSATSILYY

SEQ ID NO: 2255 - protein, 17 aa, Artificial Sequence
  Cyclic GFR-binding peptide
ALSPISILYKVGRKPKV

SEQ ID NO: 2256 - protein, 18 aa, Artificial Sequence
  Cyclic GFR-binding peptide
TKLSATSVLYYDDSSNVI

SEQ ID NO: 2257 - protein, 20 aa, Artificial Sequence
  Cyclic GFR-binding peptide
  MOD_RES (6)..(7): Xaa is C or S
KIPKAXXVPTELNAISMLYF

SEQ ID NO: 2258 - protein, 18 aa, Artificial Sequence
  Cyclic GFR-binding peptide
TQLSATSVLYYDDSSNVI

SEQ ID NO: 2259 - protein, 18 aa, Artificial Sequence
  Cyclic GFR-binding peptide
  MOD_RES (3)..(3): Xaa is C or S
VQXRPTQVQLNAISVLYF

SEQ ID NO: 2260 - protein, 17 aa, Artificial Sequence
  Cyclic GFR-binding peptide
ELNAISMLYFDENEKVV

SEQ ID NO: 2261 - protein, 17 aa, Artificial Sequence
  Cyclic GFR-binding peptide
SPISVLYKEIVRKKPIF

SEQ ID NO: 2262 - protein, 21 aa, Artificial Sequence
  Cyclic GFR-binding peptide
QVQLSPISVLYKEIVRKKPIF

SEQ ID NO: 2263 - protein, 17 aa, Artificial Sequence
  Cyclic GFR-binding peptide
  MOD_RES (3)..(4): Xaa is C or S
KPXXAPTKLSAISVLYL

SEQ ID NO: 2264 - protein, 19 aa, Artificial Sequence
  Cyclic GFR-binding peptide
PTQLSPISVLYKDDSSNVI

SEQ ID NO: 2265 - protein, 18 aa, Artificial Sequence
  Cyclic GFR-binding peptide
  MOD_RES (4)..(5): Xaa is C or S
PKAXXAPTKLSAISVLYL

SEQ ID NO: 2266 - protein, 27 aa, Artificial Sequence
  Cyclic GFR-binding peptide
  MOD_RES (6)..(7): Xaa is C or S
ASAAPXXVPQALSPISILYKVGRKPKV

SEQ ID NO: 2267 - protein, 15 aa, Artificial Sequence
  Cyclic GFR-binding peptide
  MOD_RES (1)..(2): Xaa is C or S
XXVPQALNAISILYF

SEQ ID NO: 2268 - protein, 13 aa, Artificial Sequence
  Cyclic GFR-binding peptide
VPQDLSAISILYL

SEQ ID NO: 2269 - protein, 13 aa, Artificial Sequence
  Cyclic GFR-binding peptide
VPQALNAISILYF

SEQ ID NO: 2270 - protein, 19 aa, Artificial Sequence
  Cyclic GFR-binding peptide
PQDLSAISILYLVGRTPKV

SEQ ID NO: 2271 - protein, 19 aa, Artificial Sequence
  Cyclic GFR-binding peptide
PQALSPISILYKVGRKPKV

SEQ ID NO: 2272 - protein, 14 aa, Artificial Sequence
  Cyclic GFR-binding peptide
  MOD_RES (1)..(1): Xaa is C or S
XVPTELSATSMLYY

SEQ ID NO: 2273 - protein, 14 aa, Artificial Sequence
  Cyclic GFR-binding peptide
  MOD_RES (1)..(1): Xaa is C or S
XVPQDLSAISILYL

SEQ ID NO: 2274 - protein, 16 aa, Artificial Sequence
  Cyclic GFR-binding peptide
LSATSMLYYDEYDKVV

SEQ ID NO: 2275 - protein, 15 aa, Artificial Sequence
  Cyclic GFR-binding peptide
  MOD_RES (2)..(2): Xaa is C or S
TXAPTKLSPISVLYK

SEQ ID NO: 2276 - protein, 18 aa, Artificial Sequence
  Cyclic GFR-binding peptide
  MOD_RES (4)..(5): Xaa is C or S
PKPXXAPTKLSAISVLYL

SEQ ID NO: 2277 - protein, 18 aa, Artificial Sequence
  Cyclic GFR-binding peptide
TELNAISMLYFDEYDKVV

SEQ ID NO: 2278 - protein, 17 aa, Artificial Sequence
  Cyclic GFR-binding peptide
ALNAISILYFVGRKPKV

SEQ ID NO: 2279 - protein, 14 aa, Artificial Sequence
  Cyclic GFR-binding peptide
  MOD_RES (1)..(1): Xaa is C or S
XVSQDLNAISILYF

SEQ ID NO: 2280 - protein, 16 aa, Artificial Sequence
  Cyclic GFR-binding peptide
  MOD_RES (2)..(3): Xaa is C or S
PXXVPQDLSATSILYY

SEQ ID NO: 2281 - protein, 16 aa, Artificial Sequence
  Cyclic GFR-binding peptide
LSATSILYYVGRTPKV

SEQ ID NO: 2282 - protein, 18 aa, Artificial Sequence
  Cyclic GFR-binding peptide
TKLSATSVLYYDDMGVPT

SEQ ID NO: 2283 - protein, 18 aa, Artificial Sequence
  Cyclic GFR-binding peptide
  MOD_RES (4)..(5): Xaa is C or S
GKAXXVPTKLSATSVLYY

SEQ ID NO: 2284 - protein, 27 aa, Artificial Sequence
  Cyclic GFR-binding peptide
  MOD_RES (6)..(7): Xaa is C or S
AVPKAXXAPTKLSPISVLYKDSSNNVI

SEQ ID NO: 2285 - protein, 15 aa, Artificial Sequence
  Cyclic GFR-binding peptide
  MOD_RES (1)..(2): Xaa is C or S
XXVPTELSPISMLYK

SEQ ID NO: 2286 - protein, 14 aa, Artificial Sequence
  Cyclic GFR-binding peptide
  MOD_RES (1)..(1): Xaa is C or S
XVPQDLNAISILYF

SEQ ID NO: 2287 - protein, 16 aa, Artificial Sequence
  Cyclic GFR-binding peptide
  MOD_RES (2)..(3): Xaa is C or S
PXXVSQDLSATSILYY

SEQ ID NO: 2288 - protein, 13 aa, Artificial Sequence
  Cyclic GFR-binding peptide
VPQDLNAISILYF

SEQ ID NO: 2289 - protein, 20 aa, Artificial Sequence
  Cyclic GFR-binding peptide
  MOD_RES (6)..(7): Xaa is C or S
ASASPXXVPQDLSPISILYK

SEQ ID NO: 2290 - protein, 15 aa, Artificial Sequence
  Cyclic GFR-binding peptide
  MOD_RES (1)..(2): Xaa is C or S
XXVSQDLSATSILYY

SEQ ID NO: 2291 - protein, 15 aa, Artificial Sequence
  Cyclic GFR-binding peptide
NAISVLYFDSSNNVI

SEQ ID NO: 2292 - protein, 16 aa, Artificial Sequence
  Cyclic GFR-binding peptide
LSPISMLYKDENEKVV

SEQ ID NO: 2293 - protein, 19 aa, Artificial Sequence
  Cyclic GFR-binding peptide
  MOD_RES (5)..(6): Xaa is C or S
VGKAXXVPTKLNAISVLYF

SEQ ID NO: 2294 - protein, 15 aa, Artificial Sequence
  Cyclic GFR-binding peptide
  MOD_RES (1)..(2): Xaa is C or S
XXAPTKLSAISVLYL

SEQ ID NO: 2295 - protein, 15 aa, Artificial Sequence
  Cyclic GFR-binding peptide
SATSVLYYDDMGVPT

SEQ ID NO: 2296 - protein, 16 aa, Artificial Sequence
  Cyclic GFR-binding peptide
  MOD_RES (2)..(3): Xaa is C or S
AXXVPTKLNAISVLYF

SEQ ID NO: 2297 - protein, 16 aa, Artificial Sequence
  Cyclic GFR-binding peptide
  MOD_RES (2)..(3): Xaa is C or S
PXXVSQDLSPISILYK

SEQ ID NO: 2298 - protein, 18 aa, Artificial Sequence
  Cyclic GFR-binding peptide
  MOD_RES (4)..(5): Xaa is C or S
PKPXXAPTQLSAISVLYL

SEQ ID NO: 2299 - protein, 15 aa, Artificial Sequence
  Cyclic GFR-binding peptide
  MOD_RES (1)..(2): Xaa is C or S
XXAPTQLSAISVLYL

SEQ ID NO: 2300 - protein, 20 aa, Artificial Sequence
  Cyclic GFR-binding peptide
  MOD_RES (6)..(7): Xaa is C or S
ASAAPXXVPQALNAISILYF

SEQ ID NO: 2301 - protein, 13 aa, Artificial Sequence
  Cyclic GFR-binding peptide
TQVQLSAISVLYL

SEQ ID NO: 2302 - protein, 19 aa, Artificial Sequence
  Cyclic GFR-binding peptide
  MOD_RES (6)..(6): Xaa is C or S
VTKPTXAPTKLSAISVLYL

SEQ ID NO: 2303 - protein, 20 aa, Artificial Sequence
  Cyclic GFR-binding peptide
  MOD_RES (6)..(7): Xaa is C or S
ASAAPXXVPQALSAISILYL

SEQ ID NO: 2304 - protein, 13 aa, Artificial Sequence
  Cyclic GFR-binding peptide
TQVQLNAISVLYF

SEQ ID NO: 2305 - protein, 18 aa, Artificial Sequence
  Cyclic GFR-binding peptide
  MOD_RES (4)..(5): Xaa is C or S
ASPXXVSQDLNAISILYF

SEQ ID NO: 2306 - protein, 20 aa, Artificial Sequence
  Cyclic GFR-binding peptide
  MOD_RES (6)..(7): Xaa is C or S
YVPKPXXAPTKLSATSVLYY

SEQ ID NO: 2307 - protein, 16 aa, Artificial Sequence
  Cyclic GFR-binding peptide
  MOD_RES (2)..(3): Xaa is C or S
AXXVPTKLSAISVLYL

SEQ ID NO: 2308 - protein, 19 aa, Artificial Sequence
  Cyclic GFR-binding peptide
PTELSPISMLYKDENEKVV

SEQ ID NO: 2309 - protein, 15 aa, Artificial Sequence
  Cyclic GFR-binding peptide
NAISILYFVGRTPKV

SEQ ID NO: 2310 - protein, 15 aa, Artificial Sequence
  Cyclic GFR-binding peptide
SAISVLYLDDSSNVI

SEQ ID NO: 2311 - protein, 19 aa, Artificial Sequence
  Cyclic GFR-binding peptide
  MOD_RES (4)..(4): Xaa is C or S
NVQXRPTQVQLNAISVLYF

SEQ ID NO: 2312 - protein, 17 aa, Artificial Sequence
  Cyclic GFR-binding peptide
DLSAISILYLVGRTPKV

SEQ ID NO: 2313 - protein, 18 aa, Artificial Sequence
  Cyclic GFR-binding peptide
LSPISVLYKEIVRKKPIF

SEQ ID NO: 2314 - protein, 19 aa, Artificial Sequence
  Cyclic GFR-binding peptide
SQDLSATSILYYIGKTPKI

SEQ ID NO: 2315 - protein, 17 aa, Artificial Sequence
  Cyclic GFR-binding peptide
KLNAISVLYFDDMGVPT

SEQ ID NO: 2316 - protein, 27 aa, Artificial Sequence
  Cyclic GFR-binding peptide
  MOD_RES (6)..(7): Xaa is C or S
ASAAPXXVPQALNAISILYFVGRKPKV

SEQ ID NO: 2317 - protein, 27 aa, Artificial Sequence
  Cyclic GFR-binding peptide
  MOD_RES (6)..(7): Xaa is C or S
YVPKPXXAPTKLSPISVLYKDDSSNVI

SEQ ID NO: 2318 - protein, 18 aa, Artificial Sequence
  Cyclic GFR-binding peptide
TKLSPISVLYKDSSNNVI

SEQ ID NO: 2319 - protein, 18 aa, Artificial Sequence
  Cyclic GFR-binding peptide
QDLSATSILYYIGKTPKI

SEQ ID NO: 2320 - protein, 18 aa, Artificial Sequence
  Cyclic GFR-binding peptide
  MOD_RES (5)..(5): Xaa is C or S
TKPTXAPTKLSAISVLYL

SEQ ID NO: 2321 - protein, 20 aa, Artificial Sequence
  Cyclic GFR-binding peptide
  MOD_RES (5)..(5): Xaa is C or S
RNVQXRPTQVQLSAISVLYL

SEQ ID NO: 2322 - protein, 19 aa, Artificial Sequence
  Cyclic GFR-binding peptide
  MOD_RES (5)..(6): Xaa is C or S
IPKAXXVPTELSATSMLYY

SEQ ID NO: 2323 - protein, 15 aa, Artificial Sequence
  Cyclic GFR-binding peptide
RPTQVQLSAISVLYL

SEQ ID NO: 2324 - protein, 19 aa, Artificial Sequence
  Cyclic GFR-binding peptide
PTELSATSMLYYDEYDKVV

SEQ ID NO: 2325 - protein, 18 aa, Artificial Sequence
  Cyclic GFR-binding peptide
  MOD_RES (4)..(5): Xaa is C or S
ASPXXVSQDLSAISILYL

SEQ ID NO: 2326 - protein, 17 aa, Artificial Sequence
  Cyclic GFR-binding peptide
  MOD_RES (3)..(4): Xaa is C or S
KPXXAPTQLSAISVLYL

SEQ ID NO: 2327 - protein, 27 aa, Artificial Sequence
  Cyclic GFR-binding peptide
  MOD_RES (6)..(7): Xaa is C or S
ASASPXXVSQDLNAISILYFIGKTPKI

SEQ ID NO: 2328 - protein, 15 aa, Artificial Sequence
  Cyclic GFR-binding peptide
SATSMLYYDENEKVV

SEQ ID NO: 2329 - protein, 17 aa, Artificial Sequence
  Cyclic GFR-binding peptide
  MOD_RES (3)..(4): Xaa is C or S
KAXXVPTKLSATSVLYY

SEQ ID NO: 2330 - protein, 17 aa, Artificial Sequence
  Cyclic GFR-binding peptide
  MOD_RES (3)..(4): Xaa is C or S
SPXXVSQDLSPISILYK

SEQ ID NO: 2331 - protein, 17 aa, Artificial Sequence
  Cyclic GFR-binding peptide
NAISVLYFEIVRKKPIF

SEQ ID NO: 2332 - protein, 17 aa, Artificial Sequence
  Cyclic GFR-binding peptide
DLSAISILYLIGKTPKI

SEQ ID NO: 2333 - protein, 19 aa, Artificial Sequence
  Cyclic GFR-binding peptide
PTELNAISMLYFDENEKVV

SEQ ID NO: 2334 - protein, 17 aa, Artificial Sequence
  Cyclic GFR-binding peptide
KLNAISVLYFDSSNNVI

SEQ ID NO: 2335 - protein, 27 aa, Artificial Sequence
  Cyclic GFR-binding peptide
  MOD_RES (6)..(7): Xaa is C or S
KIPKAXXVPTELNAISMLYFDENEKVV

SEQ ID NO: 2336 - protein, 14 aa, Artificial Sequence
  Cyclic GFR-binding peptide
  MOD_RES (1)..(1): Xaa is C or S
XVPQALNAISILYF

SEQ ID NO: 2337 - protein, 27 aa, Artificial Sequence
  Cyclic GFR-binding peptide
  MOD_RES (6)..(7): Xaa is C or S
ASASPXXVPQDLNAISILYFVGRTPKV

SEQ ID NO: 2338 - protein, 17 aa, Artificial Sequence
  Cyclic GFR-binding peptide
  MOD_RES (3)..(4): Xaa is C or S
KAXXAPTKLSAISVLYL

SEQ ID NO: 2339 - protein, 15 aa, Artificial Sequence
  Cyclic GFR-binding peptide
  MOD_RES (1)..(2): Xaa is C or S
XXAPTKLSPISVLYK

SEQ ID NO: 2340 - protein, 17 aa, Artificial Sequence
  Cyclic GFR-binding peptide
DLNAISILYFIGKTPKI

SEQ ID NO: 2341 - protein, 19 aa, Artificial Sequence
  Cyclic GFR-binding peptide
QLSATSVLYYEIVRKKPIF

SEQ ID NO: 2342 - protein, 16 aa, Artificial Sequence
  Cyclic GFR-binding peptide
  MOD_RES (2)..(3): Xaa is C or S
PXXAPTKLSPISVLYK

SEQ ID NO: 2343 - protein, 20 aa, Artificial Sequence
  Cyclic GFR-binding peptide
VQLSPISVLYKEIVRKKPIF

SEQ ID NO: 2344 - protein, 19 aa, Artificial Sequence
  Cyclic GFR-binding peptide
  MOD_RES (5)..(6): Xaa is C or S
SAAPXXVPQALSPISILYK

SEQ ID NO: 2345 - protein, 19 aa, Artificial Sequence
  Cyclic GFR-binding peptide
  MOD_RES (5)..(6): Xaa is C or S
SAAPXXVPQALNAISILYF

SEQ ID NO: 2346 - protein, 13 aa, Artificial Sequence
  Cyclic GFR-binding peptide
VPQDLSPISILYK

SEQ ID NO: 2347 - protein, 19 aa, Artificial Sequence
  Cyclic GFR-binding peptide
  MOD_RES (5)..(6): Xaa is C or S
IPKAXXVPTELSPISMLYK

SEQ ID NO: 2348 - protein, 16 aa, Artificial Sequence
  Cyclic GFR-binding peptide
LSPISILYKIGKTPKI

SEQ ID NO: 2349 - protein, 27 aa, Artificial Sequence
  Cyclic GFR-binding peptide
  MOD_RES (6)..(7): Xaa is C or S
SIPKAXXVPTELSATSMLYYDEYDKVV

SEQ ID NO: 2350 - protein, 19 aa, Artificial Sequence
  Cyclic GFR-binding peptide
  MOD_RES (4)..(4): Xaa is C or S
NVQXRPTQVQLSATSVLYY

SEQ ID NO: 2351 - protein, 14 aa, Artificial Sequence
  Cyclic GFR-binding peptide
  MOD_RES (1)..(1): Xaa is C or S
XAPTQLSPISVLYK

SEQ ID NO: 2352 - protein, 15 aa, Artificial Sequence
  Cyclic GFR-binding peptide
SPISILYKVGRTPKV

SEQ ID NO: 2353 - protein, 19 aa, Artificial Sequence
  Cyclic GFR-binding peptide
PQALSAISILYLVGRKPKV

SEQ ID NO: 2354 - protein, 17 aa, Artificial Sequence
  Cyclic GFR-binding peptide
  MOD_RES (3)..(4): Xaa is C or S
SPXXVPQDLSATSILYY

SEQ ID NO: 2355 - protein, 27 aa, Artificial Sequence
  Cyclic GFR-binding peptide
  MOD_RES (6)..(7): Xaa is C or S
ASASPXXVPQDLSAISILYLVGRTPKV

SEQ ID NO: 2356 - protein, 16 aa, Artificial Sequence
  Cyclic GFR-binding peptide
  MOD_RES (2)..(3): Xaa is C or S
AXXVPTELSPISMLYK

SEQ ID NO: 2357 - protein, 16 aa, Artificial Sequence
  Cyclic GFR-binding peptide
LNAISMLYFDEYDKVV

SEQ ID NO: 2358 - protein, 19 aa, Artificial Sequence
  Cyclic GFR-binding peptide
  MOD_RES (4)..(4): Xaa is C or S
NVQXRPTQVQLSAISVLYL

SEQ ID NO: 2359 - protein, 19 aa, Artificial Sequence
  Cyclic GFR-binding peptide
PTKLNAISVLYFDDMGVPT

SEQ ID NO: 2360 - protein, 18 aa, Artificial Sequence
  Cyclic GFR-binding peptide
TELSPISMLYKDENEKVV

SEQ ID NO: 2361 - protein, 15 aa, Artificial Sequence
  Cyclic GFR-binding peptide
RPTQVQLSATSVLYY

SEQ ID NO: 2362 - protein, 14 aa, Artificial Sequence
  Cyclic GFR-binding peptide
PTQVQLSATSVLYY

SEQ ID NO: 2363 - protein, 17 aa, Artificial Sequence
  Cyclic GFR-binding peptide
ALSATSILYYVGRKPKV

SEQ ID NO: 2364 - protein, 19 aa, Artificial Sequence
  Cyclic GFR-binding peptide
PQDLSATSILYYVGRTPKV

SEQ ID NO: 2365 - protein, 16 aa, Artificial Sequence
  Cyclic GFR-binding peptide
LSAISILYLVGRKPKV

SEQ ID NO: 2366 - protein, 18 aa, Artificial Sequence
  Cyclic GFR-binding peptide
  MOD_RES (5)..(5): Xaa is C or S
TKPTXAPTKLSATSVLYY

SEQ ID NO: 2367 - protein, 17 aa, Artificial Sequence
  Cyclic GFR-binding peptide
  MOD_RES (3)..(4): Xaa is C or S
KAXXVPTELSATSMLYY

SEQ ID NO: 2368 - protein, 13 aa, Artificial Sequence
  Cyclic GFR-binding peptide
VPTELSPISMLYK

SEQ ID NO: 2369 - protein, 17 aa, Artificial Sequence
  Cyclic GFR-binding peptide
SAISVLYLEIVRKKPIF

SEQ ID NO: 2370 - protein, 16 aa, Artificial Sequence
  Cyclic GFR-binding peptide
LNAISILYFVGRTPKV

SEQ ID NO: 2371 - protein, 16 aa, Artificial Sequence
  Cyclic GFR-binding peptide
  MOD_RES (1)..(1): Xaa is C or S
XRPTQVQLSPISVLYK

SEQ ID NO: 2372 - protein, 27 aa, Artificial Sequence
  Cyclic GFR-binding peptide
  MOD_RES (7)..(7): Xaa is C or S
HVTKPTXAPTKLSPISVLYKDDSSNVI

SEQ ID NO: 2373 - protein, 13 aa, Artificial Sequence
  Cyclic GFR-binding peptide
VPTKLNAISVLYF

SEQ ID NO: 2374 - protein, 17 aa, Artificial Sequence
  Cyclic GFR-binding peptide
ELNAISMLYFDEYDKVV

SEQ ID NO: 2375 - protein, 14 aa, Artificial Sequence
  Cyclic GFR-binding peptide
  MOD_RES (1)..(1): Xaa is C or S
XVSQDLSPISILYK

SEQ ID NO: 2376 - protein, 19 aa, Artificial Sequence
  Cyclic GFR-binding peptide
  MOD_RES (5)..(6): Xaa is C or S
VPKAXXAPTKLNAISVLYF

SEQ ID NO: 2377 - protein, 18 aa, Artificial Sequence
  Cyclic GFR-binding peptide
QDLSPISILYKVGRTPKV

SEQ ID NO: 2378 - protein, 18 aa, Artificial Sequence
  Cyclic GFR-binding peptide
TKLSAISVLYLDDSSNVI

SEQ ID NO: 2379 - protein, 14 aa, Artificial Sequence
  Cyclic GFR-binding peptide
  MOD_RES (1)..(1): Xaa is C or S
XAPTKLSAISVLYL

SEQ ID NO: 2380 - protein, 15 aa, Artificial Sequence
  Cyclic GFR-binding peptide
SPISVLYKDSSNNVI

SEQ ID NO: 2381 - protein, 16 aa, Artificial Sequence
  Cyclic GFR-binding peptide
  MOD_RES (1)..(1): Xaa is C or S
XRPTQVQLNAISVLYF

SEQ ID NO: 2382 - protein, 19 aa, Artificial Sequence
  Cyclic GFR-binding peptide
  MOD_RES (5)..(6): Xaa is C or S
VPKPXXAPTKLSAISVLYL

SEQ ID NO: 2383 - protein, 19 aa, Artificial Sequence
  Cyclic GFR-binding peptide
  MOD_RES (5)..(6): Xaa is C or S
IPKAXXVPTELNAISMLYF

SEQ ID NO: 2384 - protein, 17 aa, Artificial Sequence
  Cyclic GFR-binding peptide
  MOD_RES (3)..(4): Xaa is C or S
SPXXVPQDLSAISILYL

SEQ ID NO: 2385 - protein, 15 aa, Artificial Sequence
  Cyclic GFR-binding peptide
SPISMLYKDEYDKVV

SEQ ID NO: 2386 - protein, 14 aa, Artificial Sequence
  Cyclic GFR-binding peptide
  MOD_RES (1)..(1): Xaa is C or S
XVPTKLSATSVLYY

SEQ ID NO: 2387 - protein, 20 aa, Artificial Sequence
  Cyclic GFR-binding peptide
  MOD_RES (6)..(7): Xaa is C or S
SIPKAXXVPTELSPISMLYK

SEQ ID NO: 2388 - protein, 27 aa, Artificial Sequence
  Cyclic GFR-binding peptide
  MOD_RES (6)..(7): Xaa is C or S
TVPKPXXAPTQLSAISVLYLDDSSNVI

SEQ ID NO: 2389 - protein, 19 aa, Artificial Sequence
  Cyclic GFR-binding peptide
  MOD_RES (5)..(6): Xaa is C or S
SASPXXVPQDLNAISILYF

SEQ ID NO: 2390 - protein, 20 aa, Artificial Sequence
  Cyclic GFR-binding peptide
  MOD_RES (6)..(7): Xaa is C or S
SIPKAXXVPTELNAISMLYF

SEQ ID NO: 2391 - protein, 19 aa, Artificial Sequence
  Cyclic GFR-binding peptide
  MOD_RES (5)..(6): Xaa is C or S
VGKAXXVPTKLSAISVLYL

SEQ ID NO: 2392 - protein, 19 aa, Artificial Sequence
  Cyclic GFR-binding peptide
  MOD_RES (5)..(6): Xaa is C or S
VPKAXXAPTKLSPISVLYK

SEQ ID NO: 2393 - protein, 18 aa, Artificial Sequence
  Cyclic GFR-binding peptide
TQLSAISVLYLDDSSNVI

SEQ ID NO: 2394 - protein, 17 aa, Artificial Sequence
  Cyclic GFR-binding peptide
KLSAISVLYLDSSNNVI

SEQ ID NO: 2395 - protein, 16 aa, Artificial Sequence
  Cyclic GFR-binding peptide
  MOD_RES (2)..(3): Xaa is C or S
AXXVPTELNAISMLYF

SEQ ID NO: 2396 - protein, 17 aa, Artificial Sequence
  Cyclic GFR-binding peptide
  MOD_RES (3)..(4): Xaa is C or S
APXXVPQALSATSILYY

SEQ ID NO: 2397 - protein, 19 aa, Artificial Sequence
  Cyclic GFR-binding peptide
PTKLSAISVLYLDDMGVPT

SEQ ID NO: 2398 - protein, 15 aa, Artificial Sequence
  Cyclic GFR-binding peptide
  MOD_RES (1)..(2): Xaa is C or S
XXVPQDLSAISILYL

SEQ ID NO: 2399 - protein, 27 aa, Artificial Sequence
  Cyclic GFR-binding peptide
  MOD_RES (6)..(7): Xaa is C or S
YVPKPXXAPTKLSAISVLYLDDSSNVI

SEQ ID NO: 2400 - protein, 19 aa, Artificial Sequence
  Cyclic GFR-binding peptide
  MOD_RES (5)..(6): Xaa is C or S
SASPXXVPQDLSPISILYK

SEQ ID NO: 2401 - protein, 17 aa, Artificial Sequence
  Cyclic GFR-binding peptide
  MOD_RES (3)..(4): Xaa is C or S
KAXXVPTKLSAISVLYL

SEQ ID NO: 2402 - protein, 19 aa, Artificial Sequence
  Cyclic GFR-binding peptide
SQDLSPISILYKIGKTPKI

SEQ ID NO: 2403 - protein, 20 aa, Artificial Sequence
  Cyclic GFR-binding peptide
  MOD_RES (6)..(7): Xaa is C or S
AVPKAXXAPTKLSAISVLYL

SEQ ID NO: 2404 - protein, 19 aa, Artificial Sequence
  Cyclic GFR-binding peptide
PTQLSAISVLYLDDSSNVI

SEQ ID NO: 2405 - protein, 18 aa, Artificial Sequence
  Cyclic GFR-binding peptide
QDLNAISILYFVGRTPKV

SEQ ID NO: 2406 - protein, 19 aa, Artificial Sequence
  Cyclic GFR-binding peptide
PTKLSATSVLYYDDMGVPT

SEQ ID NO: 2407 - protein, 17 aa, Artificial Sequence
  Cyclic GFR-binding peptide
ELSPISMLYKDEYDKVV

SEQ ID NO: 2408 - protein, 20 aa, Artificial Sequence
  Cyclic GFR-binding peptide
  MOD_RES (6)..(7): Xaa is C or S
YVPKPXXAPTKLSPISVLYK

SEQ ID NO: 2409 - protein, 16 aa, Artificial Sequence
  Cyclic GFR-binding peptide
LNAISVLYFDSSNNVI

SEQ ID NO: 2410 - protein, 16 aa, Artificial Sequence
  Cyclic GFR-binding peptide
  MOD_RES (2)..(3): Xaa is C or S
AXXAPTKLNAISVLYF

SEQ ID NO: 2411 - protein, 16 aa, Artificial Sequence
  Cyclic GFR-binding peptide
  MOD_RES (3)..(3): Xaa is C or S
PTXAPTKLSATSVLYY

SEQ ID NO: 2412 - protein, 17 aa, Artificial Sequence
  Cyclic GFR-binding peptide
  MOD_RES (3)..(4): Xaa is C or S
APXXVPQALSAISILYL

SEQ ID NO: 2413 - protein, 20 aa, Artificial Sequence
  Cyclic GFR-binding peptide
VQLSATSVLYYEIVRKKPIF

SEQ ID NO: 2414 - protein, 19 aa, Artificial Sequence
  Cyclic GFR-binding peptide
QLSPISVLYKEIVRKKPIF

SEQ ID NO: 2415 - protein, 19 aa, Artificial Sequence
  Cyclic GFR-binding peptide
PQDLNAISILYFVGRTPKV

SEQ ID NO: 2416 - protein, 15 aa, Artificial Sequence
  Cyclic GFR-binding peptide
  MOD_RES (1)..(2): Xaa is C or S
XXVPTKLSAISVLYL

SEQ ID NO: 2417 - protein, 16 aa, Artificial Sequence
  Cyclic GFR-binding peptide
  MOD_RES (3)..(3): Xaa is C or S
PTXAPTKLSAISVLYL

SEQ ID NO: 2418 - protein, 20 aa, Artificial Sequence
  Cyclic GFR-binding peptide
VQLNAISVLYFEIVRKKPIF

SEQ ID NO: 2419 - protein, 15 aa, Artificial Sequence
  Cyclic GFR-binding peptide
SAISVLYLDSSNNVI

SEQ ID NO: 2420 - protein, 14 aa, Artificial Sequence
  Cyclic GFR-binding peptide
  MOD_RES (1)..(1): Xaa is C or S
XVSQDLSAISILYL

SEQ ID NO: 2421 - protein, 15 aa, Artificial Sequence
  Cyclic GFR-binding peptide
  MOD_RES (1)..(2): Xaa is C or S
XXVPTKLNAISVLYF

SEQ ID NO: 2422 - protein, 19 aa, Artificial Sequence
  Cyclic GFR-binding peptide
  MOD_RES (5)..(6): Xaa is C or S
VGKAXXVPTKLSATSVLYY

SEQ ID NO: 2423 - protein, 16 aa, Artificial Sequence
  Cyclic GFR-binding peptide
LSAISILYLVGRTPKV

SEQ ID NO: 2424 - protein, 17 aa, Artificial Sequence
  Cyclic GFR-binding peptide
DLSPISILYKIGKTPKI

SEQ ID NO: 2425 - protein, 20 aa, Artificial Sequence
  Cyclic GFR-binding peptide
  MOD_RES (6)..(7): Xaa is C or S
ASASPXXVPQDLSATSILYY

SEQ ID NO: 2426 - protein, 16 aa, Artificial Sequence
  Cyclic GFR-binding peptide
  MOD_RES (2)..(3): Xaa is C or S
PXXVPQDLSAISILYL

SEQ ID NO: 2427 - protein, 17 aa, Artificial Sequence
  Cyclic GFR-binding peptide
  MOD_RES (3)..(4): Xaa is C or S
KPXXAPTKLSATSVLYY

SEQ ID NO: 2428 - protein, 15 aa, Artificial Sequence
  Cyclic GFR-binding peptide
  MOD_RES (1)..(2): Xaa is C or S
XXVPTKLSATSVLYY

SEQ ID NO: 2429 - protein, 15 aa, Artificial Sequence
  Cyclic GFR-binding peptide
SATSVLYYDDSSNVI

SEQ ID NO: 2430 - protein, 20 aa, Artificial Sequence
  Cyclic GFR-binding peptide
  MOD_RES (6)..(7): Xaa is C or S
KVGKAXXVPTKLSAISVLYL

SEQ ID NO: 2431 - protein, 19 aa, Artificial Sequence
  Cyclic GFR-binding peptide
  MOD_RES (5)..(6): Xaa is C or S
VPKPXXAPTQLSPISVLYK

SEQ ID NO: 2432 - protein, 20 aa, Artificial Sequence
  Cyclic GFR-binding peptide
  MOD_RES (6)..(7): Xaa is C or S
ASASPXXVSQDLSAISILYL

SEQ ID NO: 2433 - protein, 18 aa, Artificial Sequence
  Cyclic GFR-binding peptide
  MOD_RES (4)..(5): Xaa is C or S
AAPXXVPQALNAISILYF

SEQ ID NO: 2434 - protein, 17 aa, Artificial Sequence
  Cyclic GFR-binding peptide
ALSAISILYLVGRKPKV

SEQ ID NO: 2435 - protein, 16 aa, Artificial Sequence
  Cyclic GFR-binding peptide
  MOD_RES (2)..(3): Xaa is C or S
AXXAPTKLSPISVLYK

SEQ ID NO: 2436 - protein, 19 aa, Artificial Sequence
  Cyclic GFR-binding peptide
QLSAISVLYLEIVRKKPIF

SEQ ID NO: 2437 - protein, 16 aa, Artificial Sequence
  Cyclic GFR-binding peptide
  MOD_RES (3)..(3): Xaa is C or S
PTXAPTKLSPISVLYK

SEQ ID NO: 2438 - protein, 18 aa, Artificial Sequence
  Cyclic GFR-binding peptide
TQLSPISVLYKDDSSNVI

SEQ ID NO: 2439 - protein, 15 aa, Artificial Sequence
  Cyclic GFR-binding peptide
  MOD_RES (1)..(2): Xaa is C or S
XXVSQDLNAISILYF

SEQ ID NO: 2440 - protein, 27 aa, Artificial Sequence
  Cyclic GFR-binding peptide
  MOD_RES (6)..(7): Xaa is C or S
KIPKAXXVPTELSATSMLYYDENEKVV

SEQ ID NO: 2441 - protein, 19 aa, Artificial Sequence
  Cyclic GFR-binding peptide
PQALNAISILYFVGRKPKV

SEQ ID NO: 2442 - protein, 19 aa, Artificial Sequence
  Cyclic GFR-binding peptide
PTELSATSMLYYDENEKVV

SEQ ID NO: 2443 - protein, 15 aa, Artificial Sequence
  Cyclic GFR-binding peptide
SAISILYLVGRTPKV

SEQ ID NO: 2444 - protein, 19 aa, Artificial Sequence
  Cyclic GFR-binding peptide
  MOD_RES (5)..(6): Xaa is C or S
VPKPXXAPTKLSPISVLYK

SEQ ID NO: 2445 - protein, 13 aa, Artificial Sequence
  Cyclic GFR-binding peptide
VPTKLSAISVLYL

SEQ ID NO: 2446 - protein, 16 aa, Artificial Sequence
  Cyclic GFR-binding peptide
  MOD_RES (2)..(3): Xaa is C or S
PXXAPTKLSAISVLYL

SEQ ID NO: 2447 - protein, 15 aa, Artificial Sequence
  Cyclic GFR-binding peptide
  MOD_RES (1)..(2): Xaa is C or S
XXVPQDLSATSILYY

SEQ ID NO: 2448 - protein, 20 aa, Artificial Sequence
  Cyclic GFR-binding peptide
VQLSAISVLYLEIVRKKPIF

SEQ ID NO: 2449 - protein, 13 aa, Artificial Sequence
  Cyclic GFR-binding peptide
VPQDLSATSILYY

SEQ ID NO: 2450 - protein, 15 aa, Artificial Sequence
  Cyclic GFR-binding peptide
NAISMLYFDEYDKVV

SEQ ID NO: 2451 - protein, 20 aa, Artificial Sequence
  Cyclic GFR-binding peptide
  MOD_RES (6)..(7): Xaa is C or S
KVGKAXXVPTKLSATSVLYY

SEQ ID NO: 2452 - protein, 27 aa, Artificial Sequence
  Cyclic GFR-binding peptide
  MOD_RES (7)..(7): Xaa is C or S
HVTKPTXAPTKLSAISVLYLDDSSNVI

SEQ ID NO: 2453 - protein, 20 aa, Artificial Sequence
  Cyclic GFR-binding peptide
  MOD_RES (6)..(7): Xaa is C or S
ASASPXXVSQDLNAISILYF

SEQ ID NO: 2454 - protein, 14 aa, Artificial Sequence
  Cyclic GFR-binding peptide
PTQVQLSAISVLYL

SEQ ID NO: 2455 - protein, 18 aa, Artificial Sequence
  Cyclic GFR-binding peptide
TKLSAISVLYLDDMGVPT

SEQ ID NO: 2456 - protein, 16 aa, Artificial Sequence
  Cyclic GFR-binding peptide
LSPISVLYKDDSSNVI

SEQ ID NO: 2457 - protein, 17 aa, Artificial Sequence
  Cyclic GFR-binding peptide
DLSATSILYYVGRTPKV

SEQ ID NO: 2458 - protein, 16 aa, Artificial Sequence
  Cyclic GFR-binding peptide
LSPISILYKVGRKPKV

SEQ ID NO: 2459 - protein, 13 aa, Artificial Sequence
  Cyclic GFR-binding peptide
VSQDLNAISILYF

SEQ ID NO: 2460 - protein, 14 aa, Artificial Sequence
  Cyclic GFR-binding peptide
  MOD_RES (1)..(1): Xaa is C or S
XAPTQLSAISVLYL

SEQ ID NO: 2461 - protein, 16 aa, Artificial Sequence
  Cyclic GFR-binding peptide
  MOD_RES (2)..(3): Xaa is C or S
PXXVPQDLSPISILYK

SEQ ID NO: 2462 - protein, 15 aa, Artificial Sequence
  Cyclic GFR-binding peptide
  MOD_RES (1)..(2): Xaa is C or S
XXVSQDLSPISILYK

SEQ ID NO: 2463 - protein, 27 aa, Artificial Sequence
  Cyclic GFR-binding peptide
  MOD_RES (6)..(7): Xaa is C or S
TVPKPXXAPTQLSPISVLYKDDSSNVI

SEQ ID NO: 2464 - protein, 18 aa, Artificial Sequence
  Cyclic GFR-binding peptide
  MOD_RES (4)..(5): Xaa is C or S
ASPXXVPQDLNAISILYF

SEQ ID NO: 2465 - protein, 20 aa, Artificial Sequence
  Cyclic GFR-binding peptide
  MOD_RES (6)..(7): Xaa is C or S
ASASPXXVSQDLSPISILYK

SEQ ID NO: 2466 - protein, 15 aa, Artificial Sequence
  Cyclic GFR-binding peptide
  MOD_RES (1)..(2): Xaa is C or S
XXVPTELSATSMLYY

SEQ ID NO: 2467 - protein, 17 aa, Artificial Sequence
  Cyclic GFR-binding peptide
  MOD_RES (4)..(4): Xaa is C or S
KPTXAPTKLSPISVLYK

SEQ ID NO: 2468 - protein, 18 aa, Artificial Sequence
  Cyclic GFR-binding peptide
TKLSPISVLYKDDSSNVI

SEQ ID NO: 2469 - protein, 19 aa, Artificial Sequence
  Cyclic GFR-binding peptide
PTKLSAISVLYLDDSSNVI

SEQ ID NO: 2470 - protein, 14 aa, Artificial Sequence
  Cyclic GFR-binding peptide
  MOD_RES (1)..(1): Xaa is C or S
XVSQDLSATSILYY

SEQ ID NO: 2471 - protein, 13 aa, Artificial Sequence
  Cyclic GFR-binding peptide
VSQDLSPISILYK

SEQ ID NO: 2472 - protein, 16 aa, Artificial Sequence
  Cyclic GFR-binding peptide
  MOD_RES (2)..(3): Xaa is C or S
PXXVPQDLNAISILYF

SEQ ID NO: 2473 - protein, 13 aa, Artificial Sequence
  Cyclic GFR-binding peptide
VPTELSATSMLYY

SEQ ID NO: 2474 - protein, 14 aa, Artificial Sequence
  Cyclic GFR-binding peptide
  MOD_RES (1)..(1): Xaa is C or S
XAPTQLSATSVLYY

SEQ ID NO: 2475 - protein, 16 aa, Artificial Sequence
  Cyclic GFR-binding peptide
  MOD_RES (1)..(1): Xaa is C or S
XRPTQVQLSATSVLYY

SEQ ID NO: 2476 - protein, 16 aa, Artificial Sequence
  Cyclic GFR-binding peptide
LSPISMLYKDEYDKVV

SEQ ID NO: 2477 - protein, 16 aa, Artificial Sequence
  Cyclic GFR-binding peptide
LSPISILYKVGRTPKV

SEQ ID NO: 2478 - protein, 15 aa, Artificial Sequence
  Cyclic GFR-binding peptide
  MOD_RES (1)..(2): Xaa is C or S
XXVPQALSPISILYK

SEQ ID NO: 2479 - protein, 19 aa, Artificial Sequence
  Cyclic GFR-binding peptide
SQDLSAISILYLIGKTPKI

SEQ ID NO: 2480 - protein, 18 aa, Artificial Sequence
  Cyclic GFR-binding peptide
QDLSPISILYKIGKTPKI

SEQ ID NO: 2481 - protein, 19 aa, Artificial Sequence
  Cyclic GFR-binding peptide
PQALSATSILYYVGRKPKV

SEQ ID NO: 2482 - protein, 16 aa, Artificial Sequence
  Cyclic GFR-binding peptide
  MOD_RES (2)..(3): Xaa is C or S
PXXAPTQLSPISVLYK

SEQ ID NO: 2483 - protein, 15 aa, Artificial Sequence
  Cyclic GFR-binding peptide
NAISVLYFDDMGVPT

SEQ ID NO: 2484 - protein, 19 aa, Artificial Sequence
  Cyclic GFR-binding peptide
QLNAISVLYFEIVRKKPIF

SEQ ID NO: 2485 - protein, 18 aa, Artificial Sequence
  Cyclic GFR-binding peptide
TELNAISMLYFDENEKVV

SEQ ID NO: 2486 - protein, 17 aa, Artificial Sequence
  Cyclic GFR-binding peptide
QLSATSVLYYDDSSNVI

SEQ ID NO: 2487 - protein, 16 aa, Artificial Sequence
  Cyclic GFR-binding peptide
  MOD_RES (2)..(3): Xaa is C or S
AXXVPTELSATSMLYY

SEQ ID NO: 2488 - protein, 19 aa, Artificial Sequence
  Cyclic GFR-binding peptide
  MOD_RES (5)..(6): Xaa is C or S
SASPXXVSQDLNAISILYF

SEQ ID NO: 2489 - protein, 17 aa, Artificial Sequence
  Cyclic GFR-binding peptide
KLSATSVLYYDDMGVPT

SEQ ID NO: 2490 - protein, 17 aa, Artificial Sequence
  Cyclic GFR-binding peptide
  MOD_RES (4)..(4): Xaa is C or S
KPTXAPTKLSATSVLYY

SEQ ID NO: 2491 - protein, 19 aa, Artificial Sequence
  Cyclic GFR-binding peptide
SQDLNAISILYFIGKTPKI

SEQ ID NO: 2492 - protein, 17 aa, Artificial Sequence
  Cyclic GFR-binding peptide
KLSATSVLYYDDSSNVI

SEQ ID NO: 2493 - protein, 18 aa, Artificial Sequence
  Cyclic GFR-binding peptide
QALNAISILYFVGRKPKV

SEQ ID NO: 2494 - protein, 16 aa, Artificial Sequence
  Cyclic GFR-binding peptide
LNAISILYFIGKTPKI

SEQ ID NO: 2495 - protein, 18 aa, Artificial Sequence
  Cyclic GFR-binding peptide
  MOD_RES (4)..(5): Xaa is C or S
AAPXXVPQALSPISILYK

SEQ ID NO: 2496 - protein, 20 aa, Artificial Sequence
  Cyclic GFR-binding peptide
  MOD_RES (7)..(7): Xaa is C or S
HVTKPTXAPTKLSATSVLYY

SEQ ID NO: 2497 - protein, 14 aa, Artificial Sequence
  Cyclic GFR-binding peptide
PTQVQLSPISVLYK

SEQ ID NO: 2498 - protein, 13 aa, Artificial Sequence
  Cyclic GFR-binding peptide
VPTKLSATSVLYY

SEQ ID NO: 2499 - protein, 20 aa, Artificial Sequence
  Cyclic GFR-binding peptide
  MOD_RES (6)..(7): Xaa is C or S
YVPKPXXAPTKLSAISVLYL

SEQ ID NO: 2500 - protein, 16 aa, Artificial Sequence
  Cyclic GFR-binding peptide
  MOD_RES (2)..(3): Xaa is C or S
PXXVPQALNAISILYF

SEQ ID NO: 2501 - protein, 18 aa, Artificial Sequence
  Cyclic GFR-binding peptide
QALSAISILYLVGRKPKV

SEQ ID NO: 2502 - protein, 14 aa, Artificial Sequence
  Cyclic GFR-binding peptide
  MOD_RES (1)..(1): Xaa is C or S
XAPTKLSPISVLYK

SEQ ID NO: 2503 - protein, 15 aa, Artificial Sequence
  Cyclic GFR-binding peptide
  MOD_RES (1)..(2): Xaa is C or S
XXVSQDLSAISILYL

SEQ ID NO: 2504 - protein, 27 aa, Artificial Sequence
  Cyclic GFR-binding peptide
  MOD_RES (6)..(7): Xaa is C or S
ASASPXXVPQDLSATSILYYVGRTPKV

SEQ ID NO: 2505 - protein, 15 aa, Artificial Sequence
  Cyclic GFR-binding peptide
SPISILYKVGRKPKV

SEQ ID NO: 2506 - protein, 20 aa, Artificial Sequence
  Cyclic GFR-binding peptide
  MOD_RES (6)..(7): Xaa is C or S
KVGKAXXVPTKLNAISVLYF

SEQ ID NO: 2507 - protein, 18 aa, Artificial Sequence
  Cyclic GFR-binding peptide
  MOD_RES (4)..(5): Xaa is C or S
PKPXXAPTQLSPISVLYK

SEQ ID NO: 2508 - protein, 18 aa, Artificial Sequence
  Cyclic GFR-binding peptide
TELSATSMLYYDEYDKVV

SEQ ID NO: 2509 - protein, 13 aa, Artificial Sequence
  Cyclic GFR-binding peptide
APTQLSPISVLYK

SEQ ID NO: 2510 - protein, 27 aa, Artificial Sequence
  Cyclic GFR-binding peptide
  MOD_RES (6)..(7): Xaa is C or S
ASASPXXVPQDLSPISILYKVGRTPKV

SEQ ID NO: 2511 - protein, 18 aa, Artificial Sequence
  Cyclic GFR-binding peptide
LSATSVLYYEIVRKKPIF

SEQ ID NO: 2512 - protein, 18 aa, Artificial Sequence
  Cyclic GFR-binding peptide
  MOD_RES (4)..(5): Xaa is C or S
ASPXXVSQDLSATSILYY

SEQ ID NO: 2513 - protein, 19 aa, Artificial Sequence
  Cyclic GFR-binding peptide
PTKLSPISVLYKDSSNNVI

SEQ ID NO: 2514 - protein, 19 aa, Artificial Sequence
  Cyclic GFR-binding peptide
PTELSPISMLYKDEYDKVV

SEQ ID NO: 2515 - protein, 18 aa, Artificial Sequence
  Cyclic GFR-binding peptide
  MOD_RES (4)..(5): Xaa is C or S
PKAXXVPTELSATSMLYY

SEQ ID NO: 2516 - protein, 17 aa, Artificial Sequence
  Cyclic GFR-binding peptide
  MOD_RES (3)..(4): Xaa is C or S
KAXXAPTKLSPISVLYK

SEQ ID NO: 2517 - protein, 14 aa, Artificial Sequence
  Cyclic GFR-binding peptide
  MOD_RES (1)..(1): Xaa is C or S
XVPQALSATSILYY

SEQ ID NO: 2518 - protein, 13 aa, Artificial Sequence
  Cyclic GFR-binding peptide
VPQALSPISILYK

SEQ ID NO: 2519 - protein, 20 aa, Artificial Sequence
  Cyclic GFR-binding peptide
  MOD_RES (6)..(7): Xaa is C or S
ASAAPXXVPQALSATSILYY

SEQ ID NO: 2520 - protein, 13 aa, Artificial Sequence
  Cyclic GFR-binding peptide
TQVQLSATSVLYY

SEQ ID NO: 2521 - protein, 15 aa, Artificial Sequence
  Cyclic GFR-binding peptide
  MOD_RES (1)..(2): Xaa is C or S
XXAPTQLSPISVLYK

SEQ ID NO: 2522 - protein, 19 aa, Artificial Sequence
  Cyclic GFR-binding peptide
  MOD_RES (5)..(6): Xaa is C or S
SAAPXXVPQALSAISILYL

SEQ ID NO: 2523 - protein, 15 aa, Artificial Sequence
  Cyclic GFR-binding peptide
  MOD_RES (1)..(2): Xaa is C or S
XXVPTELNAISMLYF

SEQ ID NO: 2524 - protein, 16 aa, Artificial Sequence
  Cyclic GFR-binding peptide
LSATSMLYYDENEKVV

SEQ ID NO: 2525 - protein, 27 aa, Artificial Sequence
  Cyclic GFR-binding peptide
  MOD_RES (6)..(7): Xaa is C or S
YVPKPXXAPTKLSATSVLYYDDSSNVI

SEQ ID NO: 2526 - protein, 18 aa, Artificial Sequence
  Cyclic GFR-binding peptide
  MOD_RES (4)..(5): Xaa is C or S
PKPXXAPTKLSATSVLYY

SEQ ID NO: 2527 - protein, 14 aa, Artificial Sequence
  Cyclic GFR-binding peptide
  MOD_RES (1)..(1): Xaa is C or S
XVPQDLSPISILYK

SEQ ID NO: 2528 - protein, 20 aa, Artificial Sequence
  Cyclic GFR-binding peptide
  MOD_RES (6)..(7): Xaa is C or S
ASASPXXVPQDLSAISILYL

SEQ ID NO: 2529 - protein, 19 aa, Artificial Sequence
  Cyclic GFR-binding peptide
  MOD_RES (6)..(6): Xaa is C or S
VTKPTXAPTKLSPISVLYK

SEQ ID NO: 2530 - protein, 15 aa, Artificial Sequence
  Cyclic GFR-binding peptide
  MOD_RES (2)..(2): Xaa is C or S
TXAPTKLSAISVLYL

SEQ ID NO: 2531 - protein, 18 aa, Artificial Sequence
  Cyclic GFR-binding peptide
  MOD_RES (4)..(5): Xaa is C or S
PKAXXAPTKLSPISVLYK

SEQ ID NO: 2532 - protein, 27 aa, Artificial Sequence
  Cyclic GFR-binding peptide
  MOD_RES (6)..(7): Xaa is C or S
ASAAPXXVPQALSATSILYYVGRKPKV

SEQ ID NO: 2533 - protein, 15 aa, Artificial Sequence
  Cyclic GFR-binding peptide
  MOD_RES (1)..(2): Xaa is C or S
XXVPQDLSPISILYK

SEQ ID NO: 2534 - protein, 15 aa, Artificial Sequence
  Cyclic GFR-binding peptide
RPTQVQLSPISVLYK

SEQ ID NO: 2535 - protein, 17 aa, Artificial Sequence
  Cyclic GFR-binding peptide
  MOD_RES (2)..(2): Xaa is C or S
QXRPTQVQLNAISVLYF

SEQ ID NO: 2536 - protein, 13 aa, Artificial Sequence
  Cyclic GFR-binding peptide
VPTELNAISMLYF

SEQ ID NO: 2537 - protein, 19 aa, Artificial Sequence
  Cyclic GFR-binding peptide
  MOD_RES (5)..(6): Xaa is C or S
VPKPXXAPTKLSATSVLYY

SEQ ID NO: 2538 - protein, 20 aa, Artificial Sequence
  Cyclic GFR-binding peptide
  MOD_RES (6)..(7): Xaa is C or S
ASAAPXXVPQALSPISILYK

SEQ ID NO: 2539 - protein, 18 aa, Artificial Sequence
  Cyclic GFR-binding peptide
  MOD_RES (4)..(5): Xaa is C or S
PKPXXAPTQLSATSVLYY

SEQ ID NO: 2540 - protein, 18 aa, Artificial Sequence
  Cyclic GFR-binding peptide
QDLSAISILYLVGRTPKV

SEQ ID NO: 2541 - protein, 20 aa, Artificial Sequence
  Cyclic GFR-binding peptide
  MOD_RES (6)..(7): Xaa is C or S
KIPKAXXVPTELSPISMLYK

SEQ ID NO: 2542 - protein, 17 aa, Artificial Sequence
  Cyclic GFR-binding peptide
  MOD_RES (3)..(4): Xaa is C or S
KPXXAPTQLSATSVLYY

SEQ ID NO: 2543 - protein, 15 aa, Artificial Sequence
  Cyclic GFR-binding peptide
SATSILYYVGRTPKV

SEQ ID NO: 2544 - protein, 16 aa, Artificial Sequence
  Cyclic GFR-binding peptide
LSAISVLYLDSSNNVI

SEQ ID NO: 2545 - protein, 20 aa, Artificial Sequence
  Cyclic GFR-binding peptide
  MOD_RES (6)..(7): Xaa is C or S
ASASPXXVSQDLSATSILYY

SEQ ID NO: 2546 - protein, 15 aa, Artificial Sequence
  Cyclic GFR-binding peptide
SAISILYLVGRKPKV

SEQ ID NO: 2547 - protein, 17 aa, Artificial Sequence
  Cyclic GFR-binding peptide
ELSATSMLYYDENEKVV

SEQ ID NO: 2548 - protein, 16 aa, Artificial Sequence
  Cyclic GFR-binding peptide
  MOD_RES (2)..(3): Xaa is C or S
AXXVPTKLSATSVLYY

SEQ ID NO: 2549 - protein, 16 aa, Artificial Sequence
  Cyclic GFR-binding peptide
LSATSVLYYDDSSNVI

SEQ ID NO: 2550 - protein, 20 aa, Artificial Sequence
  Cyclic GFR-binding peptide
  MOD_RES (6)..(7): Xaa is C or S
KIPKAXXVPTELSATSMLYY

SEQ ID NO: 2551 - protein, 17 aa, Artificial Sequence
  Cyclic GFR-binding peptide
  MOD_RES (3)..(4): Xaa is C or S
KPXXAPTKLSPISVLYK

SEQ ID NO: 2552 - protein, 17 aa, Artificial Sequence
  Cyclic GFR-binding peptide
  MOD_RES (3)..(4): Xaa is C or S
KPXXAPTQLSPISVLYK

SEQ ID NO: 2553 - protein, 16 aa, Artificial Sequence
  Cyclic GFR-binding peptide
LSATSVLYYDDMGVPT

SEQ ID NO: 2554 - protein, 16 aa, Artificial Sequence
  Cyclic GFR-binding peptide
  MOD_RES (2)..(3): Xaa is C or S
PXXVSQDLNAISILYF

SEQ ID NO: 2555 - protein, 16 aa, Artificial Sequence
  Cyclic GFR-binding peptide
LNAISILYFVGRKPKV

SEQ ID NO: 2556 - protein, 14 aa, Artificial Sequence
  Cyclic GFR-binding peptide
  MOD_RES (1)..(1): Xaa is C or S
XVPQDLSATSILYY

SEQ ID NO: 2557 - protein, 14 aa, Artificial Sequence
  Cyclic GFR-binding peptide
  MOD_RES (1)..(1): Xaa is C or S
XVPQALSPISILYK

SEQ ID NO: 2558 - protein, 18 aa, Artificial Sequence
  Cyclic GFR-binding peptide
  MOD_RES (3)..(3): Xaa is C or S
VQXRPTQVQLSPISVLYK

SEQ ID NO: 2559 - protein, 29 aa, Artificial Sequence
  Cyclic GFR-binding peptide
  MOD_RES (5)..(5): Xaa is C or S
RNVQXRPTQVQLSATSVLYYEIVRKKPIF

SEQ ID NO: 2560 - protein, 18 aa, Artificial Sequence
  Cyclic GFR-binding peptide
QALSPISILYKVGRKPKV

SEQ ID NO: 2561 - protein, 14 aa, Artificial Sequence
  Cyclic GFR-binding peptide
  MOD_RES (1)..(1): Xaa is C or S
XVPTELNAISMLYF

SEQ ID NO: 2562 - protein, 13 aa, Artificial Sequence
  Cyclic GFR-binding peptide
TQVQLSPISVLYK

SEQ ID NO: 2563 - protein, 17 aa, Artificial Sequence
  Cyclic GFR-binding peptide
  MOD_RES (3)..(4): Xaa is C or S
SPXXVSQDLSAISILYL

SEQ ID NO: 2564 - protein, 20 aa, Artificial Sequence
  Cyclic GFR-binding peptide
  MOD_RES (5)..(5): Xaa is C or S
RNVQXRPTQVQLSPISVLYK

SEQ ID NO: 2565 - protein, 20 aa, Artificial Sequence
  Cyclic GFR-binding peptide
  MOD_RES (6)..(7): Xaa is C or S
ASASPXXVPQDLNAISILYF

SEQ ID NO: 2566 - protein, 18 aa, Artificial Sequence
  Cyclic GFR-binding peptide
  MOD_RES (5)..(5): Xaa is C or S
TKPTXAPTKLSPISVLYK

SEQ ID NO: 2567 - protein, 18 aa, Artificial Sequence
  Cyclic GFR-binding peptide
  MOD_RES (4)..(5): Xaa is C or S
PKPXXAPTKLSPISVLYK

SEQ ID NO: 2568 - protein, 14 aa, Artificial Sequence
  Cyclic GFR-binding peptide
  MOD_RES (1)..(1): Xaa is C or S
XVPTKLNAISVLYF

SEQ ID NO: 2569 - protein, 16 aa, Artificial Sequence
  Cyclic GFR-binding peptide
LSPISVLYKDSSNNVI

SEQ ID NO: 2570 - protein, 15 aa, Artificial Sequence
  Cyclic GFR-binding peptide
  MOD_RES (1)..(2): Xaa is C or S
XXAPTQLSATSVLYY

SEQ ID NO: 2571 - protein, 17 aa, Artificial Sequence
  Cyclic GFR-binding peptide
DLSATSILYYIGKTPKI

SEQ ID NO: 2572 - protein, 14 aa, Artificial Sequence
  Cyclic GFR-binding peptide
  MOD_RES (1)..(1): Xaa is C or S
XVPTKLSAISVLYL

SEQ ID NO: 2573 - protein, 15 aa, Artificial Sequence
  Cyclic GFR-binding peptide
NAISMLYFDENEKVV

SEQ ID NO: 2574 - protein, 19 aa, Artificial Sequence
  Cyclic GFR-binding peptide
PTQLSATSVLYYDDSSNVI

SEQ ID NO: 2575 - protein, 15 aa, Artificial Sequence
  Cyclic GFR-binding peptide
SPISILYKIGKTPKI

SEQ ID NO: 2576 - protein, 19 aa, Artificial Sequence
  Cyclic GFR-binding peptide
PTKLSATSVLYYDDSSNVI

SEQ ID NO: 2577 - protein, 18 aa, Artificial Sequence
  Cyclic GFR-binding peptide
QDLNAISILYFIGKTPKI

SEQ ID NO: 2578 - protein, 20 aa, Artificial Sequence
  Cyclic GFR-binding peptide
  MOD_RES (7)..(7): Xaa is C or S
HVTKPTXAPTKLSPISVLYK

SEQ ID NO: 2579 - protein, 13 aa, Artificial Sequence
  Cyclic GFR-binding peptide
APTKLSPISVLYK

SEQ ID NO: 2580 - protein, 18 aa, Artificial Sequence
  Cyclic GFR-binding peptide
TKLNAISVLYFDDMGVPT

SEQ ID NO: 2581 - protein, 19 aa, Artificial Sequence
  Cyclic GFR-binding peptide
  MOD_RES (6)..(6): Xaa is C or S
VTKPTXAPTKLSATSVLYY

SEQ ID NO: 2582 - protein, 16 aa, Artificial Sequence
  Cyclic GFR-binding peptide
  MOD_RES (2)..(3): Xaa is C or S
PXXVSQDLSAISILYL

SEQ ID NO: 2583 - protein, 18 aa, Artificial Sequence
  Cyclic GFR-binding peptide
LSAISVLYLEIVRKKPIF

SEQ ID NO: 2584 - protein, 13 aa, Artificial Sequence
  Cyclic GFR-binding peptide
APTQLSATSVLYY

SEQ ID NO: 2585 - protein, 19 aa, Artificial Sequence
  Cyclic GFR-binding peptide
PTKLSAISVLYLDSSNNVI

SEQ ID NO: 2586 - protein, 19 aa, Artificial Sequence
  Cyclic GFR-binding peptide
  MOD_RES (4)..(4): Xaa is C or S
NVQXRPTQVQLSPISVLYK

SEQ ID NO: 2587 - protein, 27 aa, Artificial Sequence
  Cyclic GFR-binding peptide
  MOD_RES (7)..(7): Xaa is C or S
HVTKPTXAPTKLSATSVLYYDDSSNVI

SEQ ID NO: 2588 - protein, 17 aa, Artificial Sequence
  Cyclic GFR-binding peptide
KLSPISVLYKDSSNNVI

SEQ ID NO: 2589 - protein, 27 aa, Artificial Sequence
  Cyclic GFR-binding peptide
  MOD_RES (6)..(7): Xaa is C or S
ASASPXXVSQDLSATSILYYIGKTPKI

SEQ ID NO: 2590 - protein, 17 aa, Artificial Sequence
  Cyclic GFR-binding peptide
  MOD_RES (3)..(4): Xaa is C or S
SPXXVSQDLNAISILYF

SEQ ID NO: 2591 - protein, 19 aa, Artificial Sequence
  Cyclic GFR-binding peptide
PTELNAISMLYFDEYDKVV

SEQ ID NO: 2592 - protein, 13 aa, Artificial Sequence
  Cyclic GFR-binding peptide
IFLVSIPSLKTPA

SEQ ID NO: 2593 - protein, 15 aa, Artificial Sequence
  Cyclic GFR-binding peptide
IKPTKGIFYLISIAN

SEQ ID NO: 2594 - protein, 13 aa, Artificial Sequence
  Cyclic GFR-binding peptide
LYLVSIASLQTPA

SEQ ID NO: 2595 - protein, 14 aa, Artificial Sequence
  Cyclic GFR-binding peptide
  MOD_RES (14)..(14): Xaa is C or S
IFLISIPSLAQPVX

SEQ ID NO: 2596 - protein, 20 aa, Artificial Sequence
  Cyclic GFR-binding peptide
  MOD_RES (14)..(14): Xaa is C or S
IFLVSIPSLKTPAXTPKTVH

SEQ ID NO: 2597 - protein, 27 aa, Artificial Sequence
  Cyclic GFR-binding peptide
  MOD_RES (21)..(22): Xaa is C or S
VVKDYEDYYVMPLPELETPVXXAKPIS

SEQ ID NO: 2598 - protein, 13 aa, Artificial Sequence
  Cyclic GFR-binding peptide
YYVIPLPELDQPV

SEQ ID NO: 2599 - protein, 19 aa, Artificial Sequence
  Cyclic GFR-binding peptide
  MOD_RES (14)..(15): Xaa is C or S
YYLVTLPELKTPAXXPKPV

SEQ ID NO: 2600 - protein, 17 aa, Artificial Sequence
  Cyclic GFR-binding peptide
IVNSSDDLYLVSIASLK

SEQ ID NO: 2601 - protein, 19 aa, Artificial Sequence
  Cyclic GFR-binding peptide
  MOD_RES (14)..(15): Xaa is C or S
LYLISIASLDQSVXXPSAS

SEQ ID NO: 2602 - protein, 17 aa, Artificial Sequence
  Cyclic GFR-binding peptide
VVNNASDYYVIPLPELR

SEQ ID NO: 2603 - protein, 15 aa, Artificial Sequence
  Cyclic GFR-binding peptide
VKPTRGVYYLITLPE

SEQ ID NO: 2604 - protein, 15 aa, Artificial Sequence
  Cyclic GFR-binding peptide
VKPTRGVIFLISIPS

SEQ ID NO: 2605 - protein, 16 aa, Artificial Sequence
  Cyclic GFR-binding peptide
VVKENEDLYLMSIASL

SEQ ID NO: 2606 - protein, 20 aa, Artificial Sequence
  Cyclic GFR-binding peptide
  MOD_RES (14)..(15): Xaa is C or S
YYLITLPELDQSVXXPSASA

SEQ ID NO: 2607 - protein, 17 aa, Artificial Sequence
  Cyclic GFR-binding peptide
  MOD_RES (14)..(15): Xaa is C or S
YYLVTLPELQTPAXXPK

SEQ ID NO: 2608 - protein, 18 aa, Artificial Sequence
  Cyclic GFR-binding peptide
  MOD_RES (14)..(14): Xaa is C or S
YYLVTLPELKTPAXTPKT

SEQ ID NO: 2609 - protein, 16 aa, Artificial Sequence
  Cyclic GFR-binding peptide
  MOD_RES (14)..(15): Xaa is C or S
YYVVPLPELKTPAXXP

SEQ ID NO: 2610 - protein, 15 aa, Artificial Sequence
  Cyclic GFR-binding peptide
VVKDYEDIFLMSIPS

SEQ ID NO: 2611 - protein, 13 aa, Artificial Sequence
  Cyclic GFR-binding peptide
LYLISIASLRTPV

SEQ ID NO: 2612 - protein, 16 aa, Artificial Sequence
  Cyclic GFR-binding peptide
  MOD_RES (14)..(14): Xaa is C or S
YYLVTLPELKTPAXTP

SEQ ID NO: 2613 - protein, 13 aa, Artificial Sequence
  Cyclic GFR-binding peptide
LYLISIASLAQPV

SEQ ID NO: 2614 - protein, 19 aa, Artificial Sequence
  Cyclic GFR-binding peptide
VVNNASDIFLISIPSLRTP

SEQ ID NO: 2615 - protein, 19 aa, Artificial Sequence
  Cyclic GFR-binding peptide
  MOD_RES (14)..(15): Xaa is C or S
IFLISIPSLDQPVXXPSAS

SEQ ID NO: 2616 - protein, 20 aa, Artificial Sequence
  Cyclic GFR-binding peptide
  MOD_RES (14)..(15): Xaa is C or S
IFLVSIPSLKTPAXXPKPVY

SEQ ID NO: 2617 - protein, 15 aa, Artificial Sequence
  Cyclic GFR-binding peptide
IKPTKGILYLISIAS

SEQ ID NO: 2618 - protein, 16 aa, Artificial Sequence
  Cyclic GFR-binding peptide
  MOD_RES (14)..(15): Xaa is C or S
IFLMSIPSLETPVXXA

SEQ ID NO: 2619 - protein, 20 aa, Artificial Sequence
  Cyclic GFR-binding peptide
  MOD_RES (14)..(15): Xaa is C or S
IFLMSIPSLETPVXXAKPIS

SEQ ID NO: 2620 - protein, 13 aa, Artificial Sequence
  Cyclic GFR-binding peptide
YYLMTLPELETPV

SEQ ID NO: 2621 - protein, 19 aa, Artificial Sequence
  Cyclic GFR-binding peptide
  MOD_RES (14)..(15): Xaa is C or S
YYVVPLPELKTPAXXPKPV

SEQ ID NO: 2622 - protein, 15 aa, Artificial Sequence
  Cyclic GFR-binding peptide
  MOD_RES (14)..(15): Xaa is C or S
YYLMTLPELETPVXX

SEQ ID NO: 2623 - protein, 14 aa, Artificial Sequence
  Cyclic GFR-binding peptide
  MOD_RES (14)..(14): Xaa is C or S
YYLITLPELDQSVX

SEQ ID NO: 2624 - protein, 15 aa, Artificial Sequence
  Cyclic GFR-binding peptide
  MOD_RES (14)..(15): Xaa is C or S
IFLISIPSLDQSVXX

SEQ ID NO: 2625 - protein, 16 aa, Artificial Sequence
  Cyclic GFR-binding peptide
  MOD_RES (14)..(15): Xaa is C or S
YYVIPLPELDQPVXXP

SEQ ID NO: 2626 - protein, 18 aa, Artificial Sequence
  Cyclic GFR-binding peptide
IVNSSDDIFLVSIPSLKT

SEQ ID NO: 2627 - protein, 18 aa, Artificial Sequence
  Cyclic GFR-binding peptide
VKPTRGVYYLITLPELDQ

SEQ ID NO: 2628 - protein, 17 aa, Artificial Sequence
  Cyclic GFR-binding peptide
  MOD_RES (14)..(14): Xaa is C or S
IFLVSIPSLKTPAXTPK

SEQ ID NO: 2629 - protein, 20 aa, Artificial Sequence
  Cyclic GFR-binding peptide
  MOD_RES (14)..(15): Xaa is C or S
YYVIPLPELDQSVXXPSASA

SEQ ID NO: 2630 - protein, 20 aa, Artificial Sequence
  Cyclic GFR-binding peptide
  MOD_RES (14)..(15): Xaa is C or S
LYLISIASLRTPVXXTPPTS

SEQ ID NO: 2631 - protein, 17 aa, Artificial Sequence
  Cyclic GFR-binding peptide
  MOD_RES (14)..(15): Xaa is C or S
YYVVPLPELQTPAXXPK

SEQ ID NO: 2632 - protein, 17 aa, Artificial Sequence
  Cyclic GFR-binding peptide
VKPTRGVYYVIPLPELD

SEQ ID NO: 2633 - protein, 19 aa, Artificial Sequence
  Cyclic GFR-binding peptide
IKPTKGIYYLITLPELDQS

SEQ ID NO: 2634 - protein, 14 aa, Artificial Sequence
  Cyclic GFR-binding peptide
  MOD_RES (14)..(14): Xaa is C or S
YYVVPLPELQTPAX

SEQ ID NO: 2635 - protein, 18 aa, Artificial Sequence
  Cyclic GFR-binding peptide
VVKENEDYYLMTLPELET

SEQ ID NO: 2636 - protein, 17 aa, Artificial Sequence
  Cyclic GFR-binding peptide
IVNSSDDFYLVSIANLQ

SEQ ID NO: 2637 - protein, 16 aa, Artificial Sequence
  Cyclic GFR-binding peptide
IKPTKGIIFLISIPSL

SEQ ID NO: 2638 - protein, 17 aa, Artificial Sequence
  Cyclic GFR-binding peptide
  MOD_RES (14)..(14): Xaa is C or S
YYVVPLPELKTPAXTPK

SEQ ID NO: 2639 - protein, 18 aa, Artificial Sequence
  Cyclic GFR-binding peptide
IVNSSDDIFLVSIPSLQT

SEQ ID NO: 2640 - protein, 17 aa, Artificial Sequence
  Cyclic GFR-binding peptide
IVNSSDDFYLVSIANLK

SEQ ID NO: 2641 - protein, 16 aa, Artificial Sequence
  Cyclic GFR-binding peptide
IKPTKGIYYLITLPEL

SEQ ID NO: 2642 - protein, 19 aa, Artificial Sequence
  Cyclic GFR-binding peptide
  MOD_RES (14)..(15): Xaa is C or S
IFLMSIPSLETPVXXAKPI

SEQ ID NO: 2643 - protein, 18 aa, Artificial Sequence
  Cyclic GFR-binding peptide
VVKENEDIFLMSIPSLET

SEQ ID NO: 2644 - protein, 17 aa, Artificial Sequence
  Cyclic GFR-binding peptide
IVNSSDDLYLVSIASLQ

SEQ ID NO: 2645 - protein, 15 aa, Artificial Sequence
  Cyclic GFR-binding peptide
VVNNASDFYLISIAN

SEQ ID NO: 2646 - protein, 19 aa, Artificial Sequence
  Cyclic GFR-binding peptide
  MOD_RES (14)..(15): Xaa is C or S
LYLISIASLRTPVXXTPPT

SEQ ID NO: 2647 - protein, 16 aa, Artificial Sequence
  Cyclic GFR-binding peptide
  MOD_RES (14)..(14): Xaa is C or S
YYVVPLPELKTPAXTP

SEQ ID NO: 2648 - protein, 17 aa, Artificial Sequence
  Cyclic GFR-binding peptide
  MOD_RES (14)..(15): Xaa is C or S
YYVIPLPELDQSVXXPS

SEQ ID NO: 2649 - protein, 16 aa, Artificial Sequence
  Cyclic GFR-binding peptide
  MOD_RES (14)..(15): Xaa is C or S
YYLVTLPELKTPAXXP

SEQ ID NO: 2650 - protein, 19 aa, Artificial Sequence
  Cyclic GFR-binding peptide
IVNSSDDYYVVPLPELKTP

SEQ ID NO: 2651 - protein, 15 aa, Artificial Sequence
  Cyclic GFR-binding peptide
VVKENEDYYVMPLPE

SEQ ID NO: 2652 - protein, 19 aa, Artificial Sequence
  Cyclic GFR-binding peptide
  MOD_RES (14)..(15): Xaa is C or S
IFLISIPSLAQPVXXPAAS

SEQ ID NO: 2653 - protein, 16 aa, Artificial Sequence
  Cyclic GFR-binding peptide
VVKENEDFYLMSIANL

SEQ ID NO: 2654 - protein, 14 aa, Artificial Sequence
  Cyclic GFR-binding peptide
  MOD_RES (14)..(14): Xaa is C or S
YYVIPLPELRTPVX

SEQ ID NO: 2655 - protein, 19 aa, Artificial Sequence
  Cyclic GFR-binding peptide
IVNSSDDYYVVPLPELQTP

SEQ ID NO: 2656 - protein, 15 aa, Artificial Sequence
  Cyclic GFR-binding peptide
VVNNASDLYLISIAS

SEQ ID NO: 2657 - protein, 20 aa, Artificial Sequence
  Cyclic GFR-binding peptide
  MOD_RES (14)..(15): Xaa is C or S
YYLMTLPELETPVXXAKPIK

SEQ ID NO: 2658 - protein, 16 aa, Artificial Sequence
  Cyclic GFR-binding peptide
  MOD_RES (14)..(15): Xaa is C or S
LYLISIASLAQPVXXP

SEQ ID NO: 2659 - protein, 15 aa, Artificial Sequence
  Cyclic GFR-binding peptide
VVKDYEDYYLMTLPE

SEQ ID NO: 2660 - protein, 16 aa, Artificial Sequence
  Cyclic GFR-binding peptide
  MOD_RES (14)..(15): Xaa is C or S
LYLVSIASLQTPAXXP

SEQ ID NO: 2661 - protein, 18 aa, Artificial Sequence
  Cyclic GFR-binding peptide
  MOD_RES (14)..(15): Xaa is C or S
FYLVSIANLQTPAXXPKP

SEQ ID NO: 2662 - protein, 15 aa, Artificial Sequence
  Cyclic GFR-binding peptide
  MOD_RES (14)..(15): Xaa is C or S
YYVVPLPELKTPAXX

SEQ ID NO: 2663 - protein, 13 aa, Artificial Sequence
  Cyclic GFR-binding peptide
IFLISIPSLDQPV

SEQ ID NO: 2664 - protein, 15 aa, Artificial Sequence
  Cyclic GFR-binding peptide
  MOD_RES (14)..(14): Xaa is C or S
IFLVSIPSLKTPAXT

SEQ ID NO: 2665 - protein, 13 aa, Artificial Sequence
  Cyclic GFR-binding peptide
YYVVPLPELKTPA

SEQ ID NO: 2666 - protein, 18 aa, Artificial Sequence
  Cyclic GFR-binding peptide
VVKDYEDLYLMSIASLET

SEQ ID NO: 2667 - protein, 13 aa, Artificial Sequence
  Cyclic GFR-binding peptide
IFLMSIPSLETPV

SEQ ID NO: 2668 - protein, 17 aa, Artificial Sequence
  Cyclic GFR-binding peptide
VVKDYEDIFLMSIPSLE

SEQ ID NO: 2669 - protein, 20 aa, Artificial Sequence
  Cyclic GFR-binding peptide
  MOD_RES (14)..(15): Xaa is C or S
YYVMPLPELETPVXXAKPIS

SEQ ID NO: 2670 - protein, 16 aa, Artificial Sequence
  Cyclic GFR-binding peptide
  MOD_RES (14)..(15): Xaa is C or S
YYLITLPELRTPVXXT

SEQ ID NO: 2671 - protein, 27 aa, Artificial Sequence
  Cyclic GFR-binding peptide
  MOD_RES (21)..(22): Xaa is C or S
IVNSSDDIFLVSIPSLQTPAXXPKPVT

SEQ ID NO: 2672 - protein, 15 aa, Artificial Sequence
  Cyclic GFR-binding peptide
VKPKRGVFYLISIAN

SEQ ID NO: 2673 - protein, 14 aa, Artificial Sequence
  Cyclic GFR-binding peptide
  MOD_RES (14)..(14): Xaa is C or S
YYLITLPELRTPVX

SEQ ID NO: 2674 - protein, 19 aa, Artificial Sequence
  Cyclic GFR-binding peptide
VVKDYEDLYLMSIASLETP

SEQ ID NO: 2675 - protein, 18 aa, Artificial Sequence
  Cyclic GFR-binding peptide
VVNNASDFYLISIANLRT

SEQ ID NO: 2676 - protein, 16 aa, Artificial Sequence
  Cyclic GFR-binding peptide
VVNNASDIFLISIPSL

SEQ ID NO: 2677 - protein, 14 aa, Artificial Sequence
  Cyclic GFR-binding peptide
  MOD_RES (14)..(14): Xaa is C or S
YYLVTLPELKTPAX

SEQ ID NO: 2678 - protein, 16 aa, Artificial Sequence
  Cyclic GFR-binding peptide
IVNSSDDLYLVSIASL

SEQ ID NO: 2679 - protein, 16 aa, Artificial Sequence
  Cyclic GFR-binding peptide
  MOD_RES (14)..(14): Xaa is C or S
IFLVSIPSLKTPAXTP

SEQ ID NO: 2680 - protein, 17 aa, Artificial Sequence
  Cyclic GFR-binding peptide
  MOD_RES (14)..(14): Xaa is C or S
YYLVTLPELKTPAXTPK

SEQ ID NO: 2681 - protein, 14 aa, Artificial Sequence
  Cyclic GFR-binding peptide
  MOD_RES (14)..(14): Xaa is C or S
IFLISIPSLDQSVX

SEQ ID NO: 2682 - protein, 19 aa, Artificial Sequence
  Cyclic GFR-binding peptide
VKPKRGVYYLITLPELAQP

SEQ ID NO: 2683 - protein, 17 aa, Artificial Sequence
  Cyclic GFR-binding peptide
VVKENEDYYVMPLPELE

SEQ ID NO: 2684 - protein, 19 aa, Artificial Sequence
  Cyclic GFR-binding peptide
  MOD_RES (14)..(14): Xaa is C or S
YYLVTLPELKTPAXTPKTV

SEQ ID NO: 2685 - protein, 18 aa, Artificial Sequence
  Cyclic GFR-binding peptide
VKPKRGVIFLISIPSLAQ

SEQ ID NO: 2686 - protein, 15 aa, Artificial Sequence
  Cyclic GFR-binding peptide
  MOD_RES (14)..(14): Xaa is C or S
YYVVPLPELKTPAXT

SEQ ID NO: 2687 - protein, 16 aa, Artificial Sequence
  Cyclic GFR-binding peptide
  MOD_RES (14)..(15): Xaa is C or S
YYLMTLPELETPVXXA

SEQ ID NO: 2688 - protein, 13 aa, Artificial Sequence
  Cyclic GFR-binding peptide
LYLISIASLDQSV

SEQ ID NO: 2689 - protein, 17 aa, Artificial Sequence
  Cyclic GFR-binding peptide
VKPKRGVYYVIPLPELA

SEQ ID NO: 2690 - protein, 20 aa, Artificial Sequence
  Cyclic GFR-binding peptide
  MOD_RES (14)..(15): Xaa is C or S
IFLISIPSLDQSVXXPSASA

SEQ ID NO: 2691 - protein, 18 aa, Artificial Sequence
  Cyclic GFR-binding peptide
VKPKRGVYYLITLPELAQ

SEQ ID NO: 2692 - protein, 16 aa, Artificial Sequence
  Cyclic GFR-binding peptide
VKPTRGVYYVIPLPEL

SEQ ID NO: 2693 - protein, 14 aa, Artificial Sequence
  Cyclic GFR-binding peptide
  MOD_RES (14)..(14): Xaa is C or S
YYLVTLPELQTPAX

SEQ ID NO: 2694 - protein, 15 aa, Artificial Sequence
  Cyclic GFR-binding peptide
  MOD_RES (14)..(15): Xaa is C or S
YYVIPLPELDQPVXX

SEQ ID NO: 2695 - protein, 17 aa, Artificial Sequence
  Cyclic GFR-binding peptide
VVKENEDLYLMSIASLE

SEQ ID NO: 2696 - protein, 13 aa, Artificial Sequence
  Cyclic GFR-binding peptide
IFLISIPSLDQSV

SEQ ID NO: 2697 - protein, 17 aa, Artificial Sequence
  Cyclic GFR-binding peptide
  MOD_RES (14)..(15): Xaa is C or S
FYLISIANLDQPVXXPS

SEQ ID NO: 2698 - protein, 18 aa, Artificial Sequence
  Cyclic GFR-binding peptide
  MOD_RES (14)..(15): Xaa is C or S
IFLISIPSLDQPVXXPSA

SEQ ID NO: 2699 - protein, 18 aa, Artificial Sequence
  Cyclic GFR-binding peptide
  MOD_RES (14)..(15): Xaa is C or S
LYLISIASLDQPVXXPSA

SEQ ID NO: 2700 - protein, 20 aa, Artificial Sequence
  Cyclic GFR-binding peptide
  MOD_RES (14)..(14): Xaa is C or S
YYVVPLPELKTPAXTPKTVH

SEQ ID NO: 2701 - protein, 16 aa, Artificial Sequence
  Cyclic GFR-binding peptide
VKPKRGVIFLISIPSL

SEQ ID NO: 2702 - protein, 19 aa, Artificial Sequence
  Cyclic GFR-binding peptide
  MOD_RES (14)..(15): Xaa is C or S
YYLMTLPELETPVXXAKPI

SEQ ID NO: 2703 - protein, 15 aa, Artificial Sequence
  Cyclic GFR-binding peptide
  MOD_RES (14)..(15): Xaa is C or S
LYLISIASLAQPVXX

SEQ ID NO: 2704 - protein, 15 aa, Artificial Sequence
  Cyclic GFR-binding peptide
  MOD_RES (14)..(15): Xaa is C or S
IFLISIPSLAQPVXX

SEQ ID NO: 2705 - protein, 16 aa, Artificial Sequence
  Cyclic GFR-binding peptide
  MOD_RES (14)..(15): Xaa is C or S
IFLISIPSLDQPVXXP

SEQ ID NO: 2706 - protein, 17 aa, Artificial Sequence
  Cyclic GFR-binding peptide
  MOD_RES (14)..(15): Xaa is C or S
YYLMTLPELETPVXXAK

SEQ ID NO: 2707 - protein, 19 aa, Artificial Sequence
  Cyclic GFR-binding peptide
VVKENEDYYLMTLPELETP

SEQ ID NO: 2708 - protein, 27 aa, Artificial Sequence
  Cyclic GFR-binding peptide
  MOD_RES (21)..(22): Xaa is C or S
IKPTKGIIFLISIPSLDQSVXXPSASA

SEQ ID NO: 2709 - protein, 15 aa, Artificial Sequence
  Cyclic GFR-binding peptide
IVNSSDDFYLVSIAN

SEQ ID NO: 2710 - protein, 16 aa, Artificial Sequence
  Cyclic GFR-binding peptide
  MOD_RES (14)..(15): Xaa is C or S
IFLVSIPSLKTPAXXP

SEQ ID NO: 2711 - protein, 27 aa, Artificial Sequence
  Cyclic GFR-binding peptide
  MOD_RES (21)..(22): Xaa is C or S
VKPKRGVLYLISIASLAQPVXXPAASA

SEQ ID NO: 2712 - protein, 18 aa, Artificial Sequence
  Cyclic GFR-binding peptide
  MOD_RES (14)..(15): Xaa is C or S
FYLMSIANLETPVXXAKP

SEQ ID NO: 2713 - protein, 17 aa, Artificial Sequence
  Cyclic GFR-binding peptide
  MOD_RES (14)..(15): Xaa is C or S
YYLITLPELAQPVXXPA

SEQ ID NO: 2714 - protein, 19 aa, Artificial Sequence
  Cyclic GFR-binding peptide
  MOD_RES (14)..(15): Xaa is C or S
YYVIPLPELDQPVXXPSAS

SEQ ID NO: 2715 - protein, 19 aa, Artificial Sequence
  Cyclic GFR-binding peptide
IKPTKGIIFLISIPSLDQS

SEQ ID NO: 2716 - protein, 27 aa, Artificial Sequence
  Cyclic GFR-binding peptide
  MOD_RES (21)..(22): Xaa is C or S
IVNSSDDYYLVTLPELKTPAXXPKPVY

SEQ ID NO: 2717 - protein, 18 aa, Artificial Sequence
  Cyclic GFR-binding peptide
IKPTKGILYLISIASLDQ

SEQ ID NO: 2718 - protein, 27 aa, Artificial Sequence
  Cyclic GFR-binding peptide
  MOD_RES (21)..(22): Xaa is C or S
VVNNASDIFLISIPSLRTPVXXTPPTS

SEQ ID NO: 2719 - protein, 19 aa, Artificial Sequence
  Cyclic GFR-binding peptide
VVKDYEDIFLMSIPSLETP

SEQ ID NO: 2720 - protein, 14 aa, Artificial Sequence
  Cyclic GFR-binding peptide
  MOD_RES (14)..(14): Xaa is C or S
IFLVSIPSLQTPAX

SEQ ID NO: 2721 - protein, 19 aa, Artificial Sequence
  Cyclic GFR-binding peptide
  MOD_RES (14)..(15): Xaa is C or S
IFLVSIPSLQTPAXXPKPV

SEQ ID NO: 2722 - protein, 27 aa, Artificial Sequence
  Cyclic GFR-binding peptide
  MOD_RES (21)..(22): Xaa is C or S
IKPTKGILYLISIASLDQSVXXPSASA

SEQ ID NO: 2723 - protein, 17 aa, Artificial Sequence
  Cyclic GFR-binding peptide
VKPTRGVFYLISIANLD

SEQ ID NO: 2724 - protein, 17 aa, Artificial Sequence
  Cyclic GFR-binding peptide
  MOD_RES (14)..(15): Xaa is C or S
FYLMSIANLETPVXXAK

SEQ ID NO: 2725 - protein, 17 aa, Artificial Sequence
  Cyclic GFR-binding peptide
IKPTKGIIFLISIPSLD

SEQ ID NO: 2726 - protein, 20 aa, Artificial Sequence
  Cyclic GFR-binding peptide
  MOD_RES (14)..(15): Xaa is C or S
IFLVSIPSLQTPAXXPKPVT

SEQ ID NO: 2727 - protein, 17 aa, Artificial Sequence
  Cyclic GFR-binding peptide
  MOD_RES (14)..(15): Xaa is C or S
FYLISIANLAQPVXXPA

SEQ ID NO: 2728 - protein, 14 aa, Artificial Sequence
  Cyclic GFR-binding peptide
  MOD_RES (14)..(14): Xaa is C or S
YYVIPLPELDQSVX

SEQ ID NO: 2729 - protein, 20 aa, Artificial Sequence
  Cyclic GFR-binding peptide
  MOD_RES (14)..(15): Xaa is C or S
LYLVSIASLQTPAXXPKPVT

SEQ ID NO: 2730 - protein, 18 aa, Artificial Sequence
  Cyclic GFR-binding peptide
  MOD_RES (14)..(15): Xaa is C or S
LYLMSIASLETPVXXAKP

SEQ ID NO: 2731 - protein, 18 aa, Artificial Sequence
  Cyclic GFR-binding peptide
  MOD_RES (14)..(15): Xaa is C or S
LYLISIASLAQPVXXPAA

SEQ ID NO: 2732 - protein, 13 aa, Artificial Sequence
  Cyclic GFR-binding peptide
YYVMPLPELETPV

SEQ ID NO: 2733 - protein, 18 aa, Artificial Sequence
  Cyclic GFR-binding peptide
  MOD_RES (14)..(15): Xaa is C or S
IFLISIPSLAQPVXXPAA

SEQ ID NO: 2734 - protein, 19 aa, Artificial Sequence
  Cyclic GFR-binding peptide
  MOD_RES (14)..(15): Xaa is C or S
LYLVSIASLQTPAXXPKPV

SEQ ID NO: 2735 - protein, 15 aa, Artificial Sequence
  Cyclic GFR-binding peptide
  MOD_RES (14)..(15): Xaa is C or S
YYVMPLPELETPVXX

SEQ ID NO: 2736 - protein, 16 aa, Artificial Sequence
  Cyclic GFR-binding peptide
VVNNASDLYLISIASL

SEQ ID NO: 2737 - protein, 27 aa, Artificial Sequence
  Cyclic GFR-binding peptide
  MOD_RES (21)..(21): Xaa is C or S
IVNSSDDIFLVSIPSLKTPAXTPKTVH

SEQ ID NO: 2738 - protein, 13 aa, Artificial Sequence
  Cyclic GFR-binding peptide
IFLVSIPSLQTPA

SEQ ID NO: 2739 - protein, 14 aa, Artificial Sequence
  Cyclic GFR-binding peptide
  MOD_RES (14)..(14): Xaa is C or S
LYLISIASLAQPVX

SEQ ID NO: 2740 - protein, 20 aa, Artificial Sequence
  Cyclic GFR-binding peptide
  MOD_RES (14)..(14): Xaa is C or S
LYLVSIASLKTPAXTPKTVH

SEQ ID NO: 2741 - protein, 18 aa, Artificial Sequence
  Cyclic GFR-binding peptide
IKPTKGIIFLISIPSLDQ

SEQ ID NO: 2742 - protein, 16 aa, Artificial Sequence
  Cyclic GFR-binding peptide
VVKDYEDYYLMTLPEL

SEQ ID NO: 2743 - protein, 16 aa, Artificial Sequence
  Cyclic GFR-binding peptide
VVKENEDYYVMPLPEL

SEQ ID NO: 2744 - protein, 13 aa, Artificial Sequence
  Cyclic GFR-binding peptide
LYLVSIASLKTPA

SEQ ID NO: 2745 - protein, 16 aa, Artificial Sequence
  Cyclic GFR-binding peptide
VVKDYEDIFLMSIPSL

SEQ ID NO: 2746 - protein, 17 aa, Artificial Sequence
  Cyclic GFR-binding peptide
IVNSSDDYYVVPLPELQ

SEQ ID NO: 2747 - protein, 13 aa, Artificial Sequence
  Cyclic GFR-binding peptide
YYVIPLPELDQSV

SEQ ID NO: 2748 - protein, 17 aa, Artificial Sequence
  Cyclic GFR-binding peptide
IKPTKGIYYVIPLPELD

SEQ ID NO: 2749 - protein, 16 aa, Artificial Sequence
  Cyclic GFR-binding peptide
VKPTRGVYYLITLPEL

SEQ ID NO: 2750 - protein, 27 aa, Artificial Sequence
  Cyclic GFR-binding peptide
  MOD_RES (21)..(22): Xaa is C or S
VKPKRGVIFLISIPSLAQPVXXPAASA

SEQ ID NO: 2751 - protein, 16 aa, Artificial Sequence
  Cyclic GFR-binding peptide
  MOD_RES (14)..(15): Xaa is C or S
YYLITLPELDQSVXXP

SEQ ID NO: 2752 - protein, 17 aa, Artificial Sequence
  Cyclic GFR-binding peptide
IVNSSDDYYVVPLPELK

SEQ ID NO: 2753 - protein, 19 aa, Artificial Sequence
  Cyclic GFR-binding peptide
  MOD_RES (14)..(15): Xaa is C or S
YYLVTLPELQTPAXXPKPV

SEQ ID NO: 2754 - protein, 14 aa, Artificial Sequence
  Cyclic GFR-binding peptide
  MOD_RES (14)..(14): Xaa is C or S
YYLMTLPELETPVX

SEQ ID NO: 2755 - protein, 15 aa, Artificial Sequence
  Cyclic GFR-binding peptide
IKPTKGIYYVIPLPE

SEQ ID NO: 2756 - protein, 27 aa, Artificial Sequence
  Cyclic GFR-binding peptide
  MOD_RES (21)..(22): Xaa is C or S
VVNNASDYYVIPLPELRTPVXXTPPTS

SEQ ID NO: 2757 - protein, 14 aa, Artificial Sequence
  Cyclic GFR-binding peptide
  MOD_RES (14)..(14): Xaa is C or S
FYLVSIANLKTPAX

SEQ ID NO: 2758 - protein, 15 aa, Artificial Sequence
  Cyclic GFR-binding peptide
  MOD_RES (14)..(15): Xaa is C or S
YYVIPLPELRTPVXX

SEQ ID NO: 2759 - protein, 27 aa, Artificial Sequence
  Cyclic GFR-binding peptide
  MOD_RES (21)..(22): Xaa is C or S
VVKDYEDFYLMSIANLETPVXXAKPIS

SEQ ID NO: 2760 - protein, 27 aa, Artificial Sequence
  Cyclic GFR-binding peptide
  MOD_RES (21)..(22): Xaa is C or S
VKPTRGVYYVIPLPELDQPVXXPSASA

SEQ ID NO: 2761 - protein, 20 aa, Artificial Sequence
  Cyclic GFR-binding peptide
  MOD_RES (14)..(15): Xaa is C or S
YYLVTLPELKTPAXXPKPVY

SEQ ID NO: 2762 - protein, 14 aa, Artificial Sequence
  Cyclic GFR-binding peptide
  MOD_RES (14)..(14): Xaa is C or S
YYVMPLPELETPVX

SEQ ID NO: 2763 - protein, 19 aa, Artificial Sequence
  Cyclic GFR-binding peptide
VVKDYEDYYLMTLPELETP

SEQ ID NO: 2764 - protein, 19 aa, Artificial Sequence
  Cyclic GFR-binding peptide
VKPTRGVYYLITLPELDQP

SEQ ID NO: 2765 - protein, 17 aa, Artificial Sequence
  Cyclic GFR-binding peptide
  MOD_RES (14)..(15): Xaa is C or S
YYVIPLPELDQPVXXPS

SEQ ID NO: 2766 - protein, 19 aa, Artificial Sequence
  Cyclic GFR-binding peptide
  MOD_RES (14)..(15): Xaa is C or S
LYLISIASLDQPVXXPSAS

SEQ ID NO: 2767 - protein, 13 aa, Artificial Sequence
  Cyclic GFR-binding peptide
IFLISIPSLAQPV

SEQ ID NO: 2768 - protein, 16 aa, Artificial Sequence
  Cyclic GFR-binding peptide
IKPTKGILYLISIASL

SEQ ID NO: 2769 - protein, 16 aa, Artificial Sequence
  Cyclic GFR-binding peptide
  MOD_RES (14)..(15): Xaa is C or S
LYLMSIASLETPVXXA

SEQ ID NO: 2770 - protein, 18 aa, Artificial Sequence
  Cyclic GFR-binding peptide
IKPTKGIYYLITLPELDQ

SEQ ID NO: 2771 - protein, 27 aa, Artificial Sequence
  Cyclic GFR-binding peptide
  MOD_RES (21)..(22): Xaa is C or S
VVKENEDYYLMTLPELETPVXXAKPIK

SEQ ID NO: 2772 - protein, 19 aa, Artificial Sequence
  Cyclic GFR-binding peptide
  MOD_RES (14)..(14): Xaa is C or S
FYLVSIANLKTPAXTPKTV

SEQ ID NO: 2773 - protein, 17 aa, Artificial Sequence
  Cyclic GFR-binding peptide
  MOD_RES (14)..(14): Xaa is C or S
LYLVSIASLKTPAXTPK

SEQ ID NO: 2774 - protein, 16 aa, Artificial Sequence
  Cyclic GFR-binding peptide
  MOD_RES (14)..(15): Xaa is C or S
YYVIPLPELDQSVXXP

SEQ ID NO: 2775 - protein, 15 aa, Artificial Sequence
  Cyclic GFR-binding peptide
  MOD_RES (14)..(15): Xaa is C or S
FYLISIANLDQPVXX

SEQ ID NO: 2776 - protein, 18 aa, Artificial Sequence
  Cyclic GFR-binding peptide
VVNNASDIFLISIPSLRT

SEQ ID NO: 2777 - protein, 20 aa, Artificial Sequence
  Cyclic GFR-binding peptide
  MOD_RES (14)..(15): Xaa is C or S
YYLMTLPELETPVXXAKPIS

SEQ ID NO: 2778 - protein, 17 aa, Artificial Sequence
  Cyclic GFR-binding peptide
VVNNASDFYLISIANLR

SEQ ID NO: 2779 - protein, 16 aa, Artificial Sequence
  Cyclic GFR-binding peptide
  MOD_RES (14)..(15): Xaa is C or S
FYLISIANLRTPVXXT

SEQ ID NO: 2780 - protein, 17 aa, Artificial Sequence
  Cyclic GFR-binding peptide
VKPKRGVIFLISIPSLA

SEQ ID NO: 2781 - protein, 20 aa, Artificial Sequence
  Cyclic GFR-binding peptide
  MOD_RES (14)..(15): Xaa is C or S
FYLMSIANLETPVXXAKPIK

SEQ ID NO: 2782 - protein, 15 aa, Artificial Sequence
  Cyclic GFR-binding peptide
  MOD_RES (14)..(15): Xaa is C or S
YYVIPLPELDQSVXX

SEQ ID NO: 2783 - protein, 18 aa, Artificial Sequence
  Cyclic GFR-binding peptide
VVNNASDYYLITLPELRT

SEQ ID NO: 2784 - protein, 27 aa, Artificial Sequence
  Cyclic GFR-binding peptide
  MOD_RES (21)..(22): Xaa is C or S
VKPKRGVYYVIPLPELAQPVXXPAASA

SEQ ID NO: 2785 - protein, 17 aa, Artificial Sequence
  Cyclic GFR-binding peptide
VVKENEDFYLMSIANLE

SEQ ID NO: 2786 - protein, 20 aa, Artificial Sequence
  Cyclic GFR-binding peptide
  MOD_RES (14)..(15): Xaa is C or S
YYLVTLPELQTPAXXPKPVT

SEQ ID NO: 2787 - protein, 18 aa, Artificial Sequence
  Cyclic GFR-binding peptide
VKPTRGVYYVIPLPELDQ

SEQ ID NO: 2788 - protein, 15 aa, Artificial Sequence
  Cyclic GFR-binding peptide
  MOD_RES (14)..(15): Xaa is C or S
FYLVSIANLQTPAXX

SEQ ID NO: 2789 - protein, 19 aa, Artificial Sequence
  Cyclic GFR-binding peptide
VKPTRGVIFLISIPSLDQP

SEQ ID NO: 2790 - protein, 27 aa, Artificial Sequence
  Cyclic GFR-binding peptide
  MOD_RES (21)..(22): Xaa is C or S
IVNSSDDIFLVSIPSLKTPAXXPKPVY

SEQ ID NO: 2791 - protein, 14 aa, Artificial Sequence
  Cyclic GFR-binding peptide
  MOD_RES (14)..(14): Xaa is C or S
IFLVSIPSLKTPAX

SEQ ID NO: 2792 - protein, 17 aa, Artificial Sequence
  Cyclic GFR-binding peptide
  MOD_RES (14)..(15): Xaa is C or S
LYLVSIASLKTPAXXPK

SEQ ID NO: 2793 - protein, 27 aa, Artificial Sequence
  Cyclic GFR-binding peptide
  MOD_RES (21)..(21): Xaa is C or S
IVNSSDDYYVVPLPELKTPAXTPKTVH

SEQ ID NO: 2794 - protein, 16 aa, Artificial Sequence
  Cyclic GFR-binding peptide
VVKENEDIFLMSIPSL

SEQ ID NO: 2795 - protein, 15 aa, Artificial Sequence
  Cyclic GFR-binding peptide
  MOD_RES (14)..(15): Xaa is C or S
YYLITLPELRTPVXX

SEQ ID NO: 2796 - protein, 16 aa, Artificial Sequence
  Cyclic GFR-binding peptide
  MOD_RES (14)..(15): Xaa is C or S
IFLVSIPSLQTPAXXP

SEQ ID NO: 2797 - protein, 19 aa, Artificial Sequence
  Cyclic GFR-binding peptide
  MOD_RES (14)..(15): Xaa is C or S
IFLVSIPSLKTPAXXPKPV

SEQ ID NO: 2798 - protein, 15 aa, Artificial Sequence
  Cyclic GFR-binding peptide
  MOD_RES (14)..(15): Xaa is C or S
IFLISIPSLDQPVXX

SEQ ID NO: 2799 - protein, 15 aa, Artificial Sequence
  Cyclic GFR-binding peptide
  MOD_RES (14)..(15): Xaa is C or S
FYLISIANLAQPVXX

SEQ ID NO: 2800 - protein, 13 aa, Artificial Sequence
  Cyclic GFR-binding peptide
FYLVSIANLQTPA

SEQ ID NO: 2801 - protein, 13 aa, Artificial Sequence
  Cyclic GFR-binding peptide
LYLISIASLDQPV

SEQ ID NO: 2802 - protein, 13 aa, Artificial Sequence
  Cyclic GFR-binding peptide
FYLISIANLAQPV

SEQ ID NO: 2803 - protein, 19 aa, Artificial Sequence
  Cyclic GFR-binding peptide
  MOD_RES (14)..(15): Xaa is C or S
YYLITLPELAQPVXXPAAS

SEQ ID NO: 2804 - protein, 19 aa, Artificial Sequence
  Cyclic GFR-binding peptide
VKPTRGVLYLISIASLDQP

SEQ ID NO: 2805 - protein, 16 aa, Artificial Sequence
  Cyclic GFR-binding peptide
IVNSSDDYYVVPLPEL

SEQ ID NO: 2806 - protein, 14 aa, Artificial Sequence
  Cyclic GFR-binding peptide
  MOD_RES (14)..(14): Xaa is C or S
IFLISIPSLDQPVX

SEQ ID NO: 2807 - protein, 14 aa, Artificial Sequence
  Cyclic GFR-binding peptide
  MOD_RES (14)..(14): Xaa is C or S
LYLISIASLDQPVX

SEQ ID NO: 2808 - protein, 19 aa, Artificial Sequence
  Cyclic GFR-binding peptide
  MOD_RES (14)..(15): Xaa is C or S
YYVIPLPELRTPVXXTPPT

SEQ ID NO: 2809 - protein, 19 aa, Artificial Sequence
  Cyclic GFR-binding peptide
IVNSSDDFYLVSIANLKTP

SEQ ID NO: 2810 - protein, 19 aa, Artificial Sequence
  Cyclic GFR-binding peptide
VKPKRGVIFLISIPSLAQP

SEQ ID NO: 2811 - protein, 18 aa, Artificial Sequence
  Cyclic GFR-binding peptide
  MOD_RES (14)..(15): Xaa is C or S
LYLVSIASLKTPAXXPKP

SEQ ID NO: 2812 - protein, 18 aa, Artificial Sequence
  Cyclic GFR-binding peptide
VVKDYEDFYLMSIANLET

SEQ ID NO: 2813 - protein, 17 aa, Artificial Sequence
  Cyclic GFR-binding peptide
VKPKRGVFYLISIANLA

SEQ ID NO: 2814 - protein, 14 aa, Artificial Sequence
  Cyclic GFR-binding peptide
  MOD_RES (14)..(14): Xaa is C or S
FYLISIANLDQSVX

SEQ ID NO: 2815 - protein, 17 aa, Artificial Sequence
  Cyclic GFR-binding peptide
VVKDYEDYYLMTLPELE

SEQ ID NO: 2816 - protein, 17 aa, Artificial Sequence
  Cyclic GFR-binding peptide
  MOD_RES (14)..(15): Xaa is C or S
YYLITLPELRTPVXXTP

SEQ ID NO: 2817 - protein, 16 aa, Artificial Sequence
  Cyclic GFR-binding peptide
VVNNASDYYLITLPEL

SEQ ID NO: 2818 - protein, 14 aa, Artificial Sequence
  Cyclic GFR-binding peptide
  MOD_RES (14)..(14): Xaa is C or S
FYLISIANLDQPVX

SEQ ID NO: 2819 - protein, 13 aa, Artificial Sequence
  Cyclic GFR-binding peptide
FYLISIANLDQPV

SEQ ID NO: 2820 - protein, 15 aa, Artificial Sequence
  Cyclic GFR-binding peptide
  MOD_RES (14)..(15): Xaa is C or S
IFLVSIPSLKTPAXX

SEQ ID NO: 2821 - protein, 16 aa, Artificial Sequence
  Cyclic GFR-binding peptide
IVNSSDDFYLVSIANL

SEQ ID NO: 2822 - protein, 17 aa, Artificial Sequence
  Cyclic GFR-binding peptide
  MOD_RES (14)..(15): Xaa is C or S
YYLITLPELDQSVXXPS

SEQ ID NO: 2823 - protein, 17 aa, Artificial Sequence
  Cyclic GFR-binding peptide
  MOD_RES (14)..(15): Xaa is C or S
FYLVSIANLQTPAXXPK

SEQ ID NO: 2824 - protein, 15 aa, Artificial Sequence
  Cyclic GFR-binding peptide
VKPKRGVYYVIPLPE

SEQ ID NO: 2825 - protein, 18 aa, Artificial Sequence
  Cyclic GFR-binding peptide
  MOD_RES (14)..(15): Xaa is C or S
YYVIPLPELRTPVXXTPP

SEQ ID NO: 2826 - protein, 15 aa, Artificial Sequence
  Cyclic GFR-binding peptide
  MOD_RES (14)..(15): Xaa is C or S
LYLVSIASLKTPAXX

SEQ ID NO: 2827 - protein, 19 aa, Artificial Sequence
  Cyclic GFR-binding peptide
VVNNASDFYLISIANLRTP

SEQ ID NO: 2828 - protein, 19 aa, Artificial Sequence
  Cyclic GFR-binding peptide
VVNNASDYYVIPLPELRTP

SEQ ID NO: 2829 - protein, 18 aa, Artificial Sequence
  Cyclic GFR-binding peptide
  MOD_RES (14)..(15): Xaa is C or S
IFLVSIPSLKTPAXXPKP

SEQ ID NO: 2830 - protein, 17 aa, Artificial Sequence
  Cyclic GFR-binding peptide
  MOD_RES (14)..(15): Xaa is C or S
FYLVSIANLKTPAXXPK

SEQ ID NO: 2831 - protein, 18 aa, Artificial Sequence
  Cyclic GFR-binding peptide
  MOD_RES (14)..(15): Xaa is C or S
LYLVSIASLQTPAXXPKP

SEQ ID NO: 2832 - protein, 18 aa, Artificial Sequence
  Cyclic GFR-binding peptide
  MOD_RES (14)..(15): Xaa is C or S
IFLVSIPSLQTPAXXPKP

SEQ ID NO: 2833 - protein, 16 aa, Artificial Sequence
  Cyclic GFR-binding peptide
  MOD_RES (14)..(15): Xaa is C or S
FYLVSIANLQTPAXXP

SEQ ID NO: 2834 - protein, 15 aa, Artificial Sequence
  Cyclic GFR-binding peptide
  MOD_RES (14)..(15): Xaa is C or S
LYLVSIASLQTPAXX

SEQ ID NO: 2835 - protein, 15 aa, Artificial Sequence
  Cyclic GFR-binding peptide
  MOD_RES (14)..(15): Xaa is C or S
IFLVSIPSLQTPAXX

SEQ ID NO: 2836 - protein, 15 aa, Artificial Sequence
  Cyclic GFR-binding peptide
VVKENEDYYLMTLPE

SEQ ID NO: 2837 - protein, 18 aa, Artificial Sequence
  Cyclic GFR-binding peptide
VVNNASDLYLISIASLRT

SEQ ID NO: 2838 - protein, 20 aa, Artificial Sequence
  Cyclic GFR-binding peptide
  MOD_RES (14)..(15): Xaa is C or S
LYLMSIASLETPVXXAKPIK

SEQ ID NO: 2839 - protein, 20 aa, Artificial Sequence
  Cyclic GFR-binding peptide
  MOD_RES (14)..(15): Xaa is C or S
FYLISIANLAQPVXXPAASA

SEQ ID NO: 2840 - protein, 19 aa, Artificial Sequence
  Cyclic GFR-binding peptide
  MOD_RES (14)..(14): Xaa is C or S
IFLVSIPSLKTPAXTPKTV

SEQ ID NO: 2841 - protein, 19 aa, Artificial Sequence
  Cyclic GFR-binding peptide
  MOD_RES (14)..(14): Xaa is C or S
LYLVSIASLKTPAXTPKTV

SEQ ID NO: 2842 - protein, 15 aa, Artificial Sequence
  Cyclic GFR-binding peptide
VVNNASDYYVIPLPE

SEQ ID NO: 2843 - protein, 20 aa, Artificial Sequence
  Cyclic GFR-binding peptide
  MOD_RES (14)..(15): Xaa is C or S
LYLISIASLAQPVXXPAASA

SEQ ID NO: 2844 - protein, 18 aa, Artificial Sequence
  Cyclic GFR-binding peptide
IVNSSDDYYLVTLPELQT

SEQ ID NO: 2845 - protein, 18 aa, Artificial Sequence
  Cyclic GFR-binding peptide
  MOD_RES (14)..(15): Xaa is C or S
FYLISIANLDQSVXXPSA

SEQ ID NO: 2846 - protein, 16 aa, Artificial Sequence
  Cyclic GFR-binding peptide
  MOD_RES (14)..(15): Xaa is C or S
LYLISIASLRTPVXXT

SEQ ID NO: 2847 - protein, 18 aa, Artificial Sequence
  Cyclic GFR-binding peptide
  MOD_RES (14)..(14): Xaa is C or S
IFLVSIPSLKTPAXTPKT

SEQ ID NO: 2848 - protein, 19 aa, Artificial Sequence
  Cyclic GFR-binding peptide
  MOD_RES (14)..(15): Xaa is C or S
YYVMPLPELETPVXXAKPI

SEQ ID NO: 2849 - protein, 18 aa, Artificial Sequence
  Cyclic GFR-binding peptide
  MOD_RES (14)..(14): Xaa is C or S
FYLVSIANLKTPAXTPKT

SEQ ID NO: 2850 - protein, 19 aa, Artificial Sequence
  Cyclic GFR-binding peptide
VVKENEDIFLMSIPSLETP

SEQ ID NO: 2851 - protein, 18 aa, Artificial Sequence
  Cyclic GFR-binding peptide
IVNSSDDYYLVTLPELKT

SEQ ID NO: 2852 - protein, 13 aa, Artificial Sequence
  Cyclic GFR-binding peptide
YYVIPLPELRTPV

SEQ ID NO: 2853 - protein, 15 aa, Artificial Sequence
  Cyclic GFR-binding peptide
VKPTRGVFYLISIAN

SEQ ID NO: 2854 - protein, 15 aa, Artificial Sequence
  Cyclic GFR-binding peptide
IVNSSDDLYLVSIAS

SEQ ID NO: 2855 - protein, 17 aa, Artificial Sequence
  Cyclic GFR-binding peptide
VKPTRGVLYLISIASLD

SEQ ID NO: 2856 - protein, 20 aa, Artificial Sequence
  Cyclic GFR-binding peptide
  MOD_RES (14)..(15): Xaa is C or S
IFLMSIPSLETPVXXAKPIK

SEQ ID NO: 2857 - protein, 27 aa, Artificial Sequence
  Cyclic GFR-binding peptide
  MOD_RES (21)..(22): Xaa is C or S
VKPKRGVFYLISIANLAQPVXXPAASA

SEQ ID NO: 2858 - protein, 15 aa, Artificial Sequence
  Cyclic GFR-binding peptide
  MOD_RES (14)..(15): Xaa is C or S
FYLVSIANLKTPAXX

SEQ ID NO: 2859 - protein, 16 aa, Artificial Sequence
  Cyclic GFR-binding peptide
VKPKRGVYYLITLPEL

SEQ ID NO: 2860 - protein, 15 aa, Artificial Sequence
  Cyclic GFR-binding peptide
  MOD_RES (14)..(14): Xaa is C or S
YYLVTLPELKTPAXT

SEQ ID NO: 2861 - protein, 17 aa, Artificial Sequence
  Cyclic GFR-binding peptide
VKPTRGVIFLISIPSLD

SEQ ID NO: 2862 - protein, 19 aa, Artificial Sequence
  Cyclic GFR-binding peptide
  MOD_RES (14)..(15): Xaa is C or S
YYVIPLPELDQSVXXPSAS

SEQ ID NO: 2863 - protein, 18 aa, Artificial Sequence
  Cyclic GFR-binding peptide
VVKDYEDYYVMPLPELET

SEQ ID NO: 2864 - protein, 27 aa, Artificial Sequence
  Cyclic GFR-binding peptide
  MOD_RES (21)..(22): Xaa is C or S
IVNSSDDYYLVTLPELQTPAXXPKPVT

SEQ ID NO: 2865 - protein, 19 aa, Artificial Sequence
  Cyclic GFR-binding peptide
IVNSSDDFYLVSIANLQTP

SEQ ID NO: 2866 - protein, 27 aa, Artificial Sequence
  Cyclic GFR-binding peptide
  MOD_RES (21)..(21): Xaa is C or S
IVNSSDDFYLVSIANLKTPAXTPKTVH

SEQ ID NO: 2867 - protein, 18 aa, Artificial Sequence
  Cyclic GFR-binding peptide
  MOD_RES (14)..(14): Xaa is C or S
LYLVSIASLKTPAXTPKT

SEQ ID NO: 2868 - protein, 18 aa, Artificial Sequence
  Cyclic GFR-binding peptide
  MOD_RES (14)..(15): Xaa is C or S
FYLVSIANLKTPAXXPKP

SEQ ID NO: 2869 - protein, 18 aa, Artificial Sequence
  Cyclic GFR-binding peptide
  MOD_RES (14)..(15): Xaa is C or S
IFLISIPSLDQSVXXPSA

SEQ ID NO: 2870 - protein, 17 aa, Artificial Sequence
  Cyclic GFR-binding peptide
  MOD_RES (14)..(15): Xaa is C or S
IFLVSIPSLQTPAXXPK

SEQ ID NO: 2871 - protein, 20 aa, Artificial Sequence
  Cyclic GFR-binding peptide
  MOD_RES (14)..(15): Xaa is C or S
YYVVPLPELKTPAXXPKPVY

SEQ ID NO: 2872 - protein, 18 aa, Artificial Sequence
  Cyclic GFR-binding peptide
  MOD_RES (14)..(15): Xaa is C or S
LYLISIASLDQSVXXPSA

SEQ ID NO: 2873 - protein, 17 aa, Artificial Sequence
  Cyclic GFR-binding peptide
  MOD_RES (14)..(15): Xaa is C or S
LYLVSIASLQTPAXXPK

SEQ ID NO: 2874 - protein, 27 aa, Artificial Sequence
  Cyclic GFR-binding peptide
  MOD_RES (21)..(22): Xaa is C or S
IKPTKGIFYLISIANLDQSVXXPSASA

SEQ ID NO: 2875 - protein, 27 aa, Artificial Sequence
  Cyclic GFR-binding peptide
  MOD_RES (21)..(22): Xaa is C or S
VVKENEDIFLMSIPSLETPVXXAKPIK

SEQ ID NO: 2876 - protein, 13 aa, Artificial Sequence
  Cyclic GFR-binding peptide
FYLVSIANLKTPA

SEQ ID NO: 2877 - protein, 17 aa, Artificial Sequence
  Cyclic GFR-binding peptide
IKPTKGILYLISIASLD

SEQ ID NO: 2878 - protein, 27 aa, Artificial Sequence
  Cyclic GFR-binding peptide
  MOD_RES (21)..(22): Xaa is C or S
VVNNASDFYLISIANLRTPVXXTPPTS

SEQ ID NO: 2879 - protein, 19 aa, Artificial Sequence
  Cyclic GFR-binding peptide
VVKENEDFYLMSIANLETP

SEQ ID NO: 2880 - protein, 27 aa, Artificial Sequence
  Cyclic GFR-binding peptide
  MOD_RES (21)..(22): Xaa is C or S
VVKENEDFYLMSIANLETPVXXAKPIK

SEQ ID NO: 2881 - protein, 14 aa, Artificial Sequence
  Cyclic GFR-binding peptide
  MOD_RES (14)..(14): Xaa is C or S
FYLISIANLAQPVX

SEQ ID NO: 2882 - protein, 18 aa, Artificial Sequence
  Cyclic GFR-binding peptide
VKPKRGVYYVIPLPELAQ

SEQ ID NO: 2883 - protein, 27 aa, Artificial Sequence
  Cyclic GFR-binding peptide
  MOD_RES (21)..(22): Xaa is C or S
VKPTRGVFYLISIANLDQPVXXPSASA

SEQ ID NO: 2884 - protein, 20 aa, Artificial Sequence
  Cyclic GFR-binding peptide
  MOD_RES (14)..(15): Xaa is C or S
YYLITLPELRTPVXXTPPTS

SEQ ID NO: 2885 - protein, 17 aa, Artificial Sequence
  Cyclic GFR-binding peptide
VVKENEDIFLMSIPSLE

SEQ ID NO: 2886 - protein, 17 aa, Artificial Sequence
  Cyclic GFR-binding peptide
IKPTKGIFYLISIANLD

SEQ ID NO: 2887 - protein, 27 aa, Artificial Sequence
  Cyclic GFR-binding peptide
  MOD_RES (21)..(22): Xaa is C or S
VVKENEDLYLMSIASLETPVXXAKPIK

SEQ ID NO: 2888 - protein, 19 aa, Artificial Sequence
  Cyclic GFR-binding peptide
IKPTKGIYYVIPLPELDQS

SEQ ID NO: 2889 - protein, 14 aa, Artificial Sequence
  Cyclic GFR-binding peptide
  MOD_RES (14)..(14): Xaa is C or S
FYLVSIANLQTPAX

SEQ ID NO: 2890 - protein, 18 aa, Artificial Sequence
  Cyclic GFR-binding peptide
  MOD_RES (14)..(15): Xaa is C or S
YYLVTLPELKTPAXXPKP

SEQ ID NO: 2891 - protein, 15 aa, Artificial Sequence
  Cyclic GFR-binding peptide
  MOD_RES (14)..(15): Xaa is C or S
LYLMSIASLETPVXX

SEQ ID NO: 2892 - protein, 18 aa, Artificial Sequence
  Cyclic GFR-binding peptide
  MOD_RES (14)..(15): Xaa is C or S
YYVMPLPELETPVXXAKP

SEQ ID NO: 2893 - protein, 19 aa, Artificial Sequence
  Cyclic GFR-binding peptide
  MOD_RES (14)..(15): Xaa is C or S
FYLISIANLAQPVXXPAAS

SEQ ID NO: 2894 - protein, 18 aa, Artificial Sequence
  Cyclic GFR-binding peptide
VVKENEDYYVMPLPELET

SEQ ID NO: 2895 - protein, 18 aa, Artificial Sequence
  Cyclic GFR-binding peptide
  MOD_RES (14)..(15): Xaa is C or S
YYVIPLPELDQSVXXPSA

SEQ ID NO: 2896 - protein, 17 aa, Artificial Sequence
  Cyclic GFR-binding peptide
VVKENEDYYLMTLPELE

SEQ ID NO: 2897 - protein, 19 aa, Artificial Sequence
  Cyclic GFR-binding peptide
VVKENEDLYLMSIASLETP

SEQ ID NO: 2898 - protein, 27 aa, Artificial Sequence
  Cyclic GFR-binding peptide
  MOD_RES (21)..(22): Xaa is C or S
VVNNASDLYLISIASLRTPVXXTPPTS

SEQ ID NO: 2899 - protein, 15 aa, Artificial Sequence
  Cyclic GFR-binding peptide
  MOD_RES (14)..(14): Xaa is C or S
FYLVSIANLKTPAXT

SEQ ID NO: 2900 - protein, 17 aa, Artificial Sequence
  Cyclic GFR-binding peptide
VKPTRGVYYLITLPELD

SEQ ID NO: 2901 - protein, 19 aa, Artificial Sequence
  Cyclic GFR-binding peptide
VKPKRGVLYLISIASLAQP

SEQ ID NO: 2902 - protein, 20 aa, Artificial Sequence
  Cyclic GFR-binding peptide
  MOD_RES (14)..(14): Xaa is C or S
FYLVSIANLKTPAXTPKTVH

SEQ ID NO: 2903 - protein, 20 aa, Artificial Sequence
  Cyclic GFR-binding peptide
  MOD_RES (14)..(15): Xaa is C or S
IFLISIPSLAQPVXXPAASA

SEQ ID NO: 2904 - protein, 15 aa, Artificial Sequence
  Cyclic GFR-binding peptide
IVNSSDDIFLVSIPS

SEQ ID NO: 2905 - protein, 27 aa, Artificial Sequence
  Cyclic GFR-binding peptide
  MOD_RES (21)..(22): Xaa is C or S
VKPTRGVLYLISIASLDQPVXXPSASA

SEQ ID NO: 2906 - protein, 16 aa, Artificial Sequence
  Cyclic GFR-binding peptide
VVKDYEDFYLMSIANL

SEQ ID NO: 2907 - protein, 13 aa, Artificial Sequence
  Cyclic GFR-binding peptide
YYLITLPELAQPV

SEQ ID NO: 2908 - protein, 17 aa, Artificial Sequence
  Cyclic GFR-binding peptide
  MOD_RES (14)..(15): Xaa is C or S
YYVIPLPELRTPVXXTP

SEQ ID NO: 2909 - protein, 16 aa, Artificial Sequence
  Cyclic GFR-binding peptide
  MOD_RES (14)..(15): Xaa is C or S
FYLVSIANLKTPAXXP

SEQ ID NO: 2910 - protein, 16 aa, Artificial Sequence
  Cyclic GFR-binding peptide
VKPKRGVLYLISIASL

SEQ ID NO: 2911 - protein, 15 aa, Artificial Sequence
  Cyclic GFR-binding peptide
VKPTRGVYYVIPLPE

SEQ ID NO: 2912 - protein, 13 aa, Artificial Sequence
  Cyclic GFR-binding peptide
YYLVTLPELQTPA

SEQ ID NO: 2913 - protein, 16 aa, Artificial Sequence
  Cyclic GFR-binding peptide
VKPTRGVFYLISIANL

SEQ ID NO: 2914 - protein, 15 aa, Artificial Sequence
  Cyclic GFR-binding peptide
VVKDYEDYYVMPLPE

SEQ ID NO: 2915 - protein, 18 aa, Artificial Sequence
  Cyclic GFR-binding peptide
VVKDYEDIFLMSIPSLET

SEQ ID NO: 2916 - protein, 16 aa, Artificial Sequence
  Cyclic GFR-binding peptide
VVKDYEDLYLMSIASL

SEQ ID NO: 2917 - protein, 17 aa, Artificial Sequence
  Cyclic GFR-binding peptide
VVKDYEDFYLMSIANLE

SEQ ID NO: 2918 - protein, 18 aa, Artificial Sequence
  Cyclic GFR-binding peptide
  MOD_RES (14)..(15): Xaa is C or S
YYLITLPELRTPVXXTPP

SEQ ID NO: 2919 - protein, 15 aa, Artificial Sequence
  Cyclic GFR-binding peptide
VVNNASDIFLISIPS

SEQ ID NO: 2920 - protein, 27 aa, Artificial Sequence
  Cyclic GFR-binding peptide
  MOD_RES (21)..(22): Xaa is C or S
IVNSSDDFYLVSIANLQTPAXXPKPVT

SEQ ID NO: 2921 - protein, 18 aa, Artificial Sequence
  Cyclic GFR-binding peptide
  MOD_RES (14)..(15): Xaa is C or S
YYVVPLPELKTPAXXPKP

SEQ ID NO: 2922 - protein, 18 aa, Artificial Sequence
  Cyclic GFR-binding peptide
IVNSSDDLYLVSIASLKT

SEQ ID NO: 2923 - protein, 14 aa, Artificial Sequence
  Cyclic GFR-binding peptide
  MOD_RES (14)..(14): Xaa is C or S
LYLVSIASLKTPAX

SEQ ID NO: 2924 - protein, 19 aa, Artificial Sequence
  Cyclic GFR-binding peptide
  MOD_RES (14)..(15): Xaa is C or S
LYLVSIASLKTPAXXPKPV

SEQ ID NO: 2925 - protein, 19 aa, Artificial Sequence
  Cyclic GFR-binding peptide
  MOD_RES (14)..(15): Xaa is C or S
FYLMSIANLETPVXXAKPI

SEQ ID NO: 2926 - protein, 17 aa, Artificial Sequence
  Cyclic GFR-binding peptide
  MOD_RES (14)..(15): Xaa is C or S
LYLISIASLDQPVXXPS

SEQ ID NO: 2927 - protein, 16 aa, Artificial Sequence
  Cyclic GFR-binding peptide
VVNNASDYYVIPLPEL

SEQ ID NO: 2928 - protein, 17 aa, Artificial Sequence
  Cyclic GFR-binding peptide
VVKDYEDLYLMSIASLE

SEQ ID NO: 2929 - protein, 27 aa, Artificial Sequence
  Cyclic GFR-binding peptide
  MOD_RES (21)..(22): Xaa is C or S
IVNSSDDFYLVSIANLKTPAXXPKPVY

SEQ ID NO: 2930 - protein, 27 aa, Artificial Sequence
  Cyclic GFR-binding peptide
  MOD_RES (21)..(22): Xaa is C or S
IVNSSDDLYLVSIASLQTPAXXPKPVT

SEQ ID NO: 2931 - protein, 19 aa, Artificial Sequence
  Cyclic GFR-binding peptide
  MOD_RES (14)..(15): Xaa is C or S
FYLISIANLDQPVXXPSAS

SEQ ID NO: 2932 - protein, 20 aa, Artificial Sequence
  Cyclic GFR-binding peptide
  MOD_RES (14)..(15): Xaa is C or S
FYLMSIANLETPVXXAKPIS

SEQ ID NO: 2933 - protein, 18 aa, Artificial Sequence
  Cyclic GFR-binding peptide
IVNSSDDLYLVSIASLQT

SEQ ID NO: 2934 - protein, 20 aa, Artificial Sequence
  Cyclic GFR-binding peptide
  MOD_RES (14)..(15): Xaa is C or S
FYLVSIANLKTPAXXPKPVY

SEQ ID NO: 2935 - protein, 13 aa, Artificial Sequence
  Cyclic GFR-binding peptide
YYLITLPELRTPV

SEQ ID NO: 2936 - protein, 20 aa, Artificial Sequence
  Cyclic GFR-binding peptide
  MOD_RES (14)..(15): Xaa is C or S
IFLISIPSLDQPVXXPSASA

SEQ ID NO: 2937 - protein, 16 aa, Artificial Sequence
  Cyclic GFR-binding peptide
  MOD_RES (14)..(15): Xaa is C or S
FYLMSIANLETPVXXA

SEQ ID NO: 2938 - protein, 17 aa, Artificial Sequence
  Cyclic GFR-binding peptide
  MOD_RES (14)..(15): Xaa is C or S
IFLVSIPSLKTPAXXPK

SEQ ID NO: 2939 - protein, 15 aa, Artificial Sequence
  Cyclic GFR-binding peptide
  MOD_RES (14)..(15): Xaa is C or S
LYLISIASLDQPVXX

SEQ ID NO: 2940 - protein, 27 aa, Artificial Sequence
  Cyclic GFR-binding peptide
  MOD_RES (21)..(22): Xaa is C or S
IVNSSDDLYLVSIASLKTPAXXPKPVY

SEQ ID NO: 2941 - protein, 19 aa, Artificial Sequence
  Cyclic GFR-binding peptide
VVKDYEDYYVMPLPELETP

SEQ ID NO: 2942 - protein, 15 aa, Artificial Sequence
  Cyclic GFR-binding peptide
IVNSSDDYYLVTLPE

SEQ ID NO: 2943 - protein, 27 aa, Artificial Sequence
  Cyclic GFR-binding peptide
  MOD_RES (21)..(22): Xaa is C or S
IKPTKGIYYVIPLPELDQSVXXPSASA

SEQ ID NO: 2944 - protein, 16 aa, Artificial Sequence
  Cyclic GFR-binding peptide
  MOD_RES (14)..(15): Xaa is C or S
YYLITLPELAQPVXXP

SEQ ID NO: 2945 - protein, 19 aa, Artificial Sequence
  Cyclic GFR-binding peptide
VVNNASDLYLISIASLRTP

SEQ ID NO: 2946 - protein, 19 aa, Artificial Sequence
  Cyclic GFR-binding peptide
IVNSSDDLYLVSIASLQTP

SEQ ID NO: 2947 - protein, 18 aa, Artificial Sequence
  Cyclic GFR-binding peptide
VKPTRGVFYLISIANLDQ

SEQ ID NO: 2948 - protein, 13 aa, Artificial Sequence
  Cyclic GFR-binding peptide
LYLMSIASLETPV

SEQ ID NO: 2949 - protein, 17 aa, Artificial Sequence
  Cyclic GFR-binding peptide
IVNSSDDIFLVSIPSLQ

SEQ ID NO: 2950 - protein, 17 aa, Artificial Sequence
  Cyclic GFR-binding peptide
  MOD_RES (14)..(15): Xaa is C or S
LYLISIASLAQPVXXPA

SEQ ID NO: 2951 - protein, 17 aa, Artificial Sequence
  Cyclic GFR-binding peptide
IVNSSDDIFLVSIPSLK

SEQ ID NO: 2952 - protein, 19 aa, Artificial Sequence
  Cyclic GFR-binding peptide
VKPTRGVFYLISIANLDQP

SEQ ID NO: 2953 - protein, 16 aa, Artificial Sequence
  Cyclic GFR-binding peptide
  MOD_RES (14)..(14): Xaa is C or S
LYLVSIASLKTPAXTP

SEQ ID NO: 2954 - protein, 14 aa, Artificial Sequence
  Cyclic GFR-binding peptide
  MOD_RES (14)..(14): Xaa is C or S
LYLISIASLDQSVX

SEQ ID NO: 2955 - protein, 16 aa, Artificial Sequence
  Cyclic GFR-binding peptide
  MOD_RES (14)..(14): Xaa is C or S
FYLVSIANLKTPAXTP

SEQ ID NO: 2956 - protein, 19 aa, Artificial Sequence
  Cyclic GFR-binding peptide
  MOD_RES (14)..(15): Xaa is C or S
YYLITLPELDQSVXXPSAS

SEQ ID NO: 2957 - protein, 27 aa, Artificial Sequence
  Cyclic GFR-binding peptide
  MOD_RES (21)..(22): Xaa is C or S
VVKDYEDIFLMSIPSLETPVXXAKPIS

SEQ ID NO: 2958 - protein, 16 aa, Artificial Sequence
  Cyclic GFR-binding peptide
VKPTRGVLYLISIASL

SEQ ID NO: 2959 - protein, 18 aa, Artificial Sequence
  Cyclic GFR-binding peptide
  MOD_RES (14)..(15): Xaa is C or S
YYLMTLPELETPVXXAKP

SEQ ID NO: 2960 - protein, 19 aa, Artificial Sequence
  Cyclic GFR-binding peptide
  MOD_RES (14)..(15): Xaa is C or S
FYLVSIANLQTPAXXPKPV

SEQ ID NO: 2961 - protein, 17 aa, Artificial Sequence
  Cyclic GFR-binding peptide
  MOD_RES (14)..(15): Xaa is C or S
IFLMSIPSLETPVXXAK

SEQ ID NO: 2962 - protein, 17 aa, Artificial Sequence
  Cyclic GFR-binding peptide
  MOD_RES (14)..(15): Xaa is C or S
IFLISIPSLAQPVXXPA

SEQ ID NO: 2963 - protein, 17 aa, Artificial Sequence
  Cyclic GFR-binding peptide
  MOD_RES (14)..(15): Xaa is C or S
LYLMSIASLETPVXXAK

SEQ ID NO: 2964 - protein, 16 aa, Artificial Sequence
  Cyclic GFR-binding peptide
  MOD_RES (14)..(15): Xaa is C or S
LYLISIASLDQPVXXP

SEQ ID NO: 2965 - protein, 16 aa, Artificial Sequence
  Cyclic GFR-binding peptide
VVKENEDYYLMTLPEL

SEQ ID NO: 2966 - protein, 20 aa, Artificial Sequence
  Cyclic GFR-binding peptide
  MOD_RES (14)..(15): Xaa is C or S
LYLISIASLDQSVXXPSASA

SEQ ID NO: 2967 - protein, 19 aa, Artificial Sequence
  Cyclic GFR-binding peptide
  MOD_RES (14)..(15): Xaa is C or S
FYLVSIANLKTPAXXPKPV

SEQ ID NO: 2968 - protein, 20 aa, Artificial Sequence
  Cyclic GFR-binding peptide
  MOD_RES (14)..(15): Xaa is C or S
FYLVSIANLQTPAXXPKPVT

SEQ ID NO: 2969 - protein, 18 aa, Artificial Sequence
  Cyclic GFR-binding peptide
  MOD_RES (14)..(15): Xaa is C or S
FYLISIANLAQPVXXPAA

SEQ ID NO: 2970 - protein, 17 aa, Artificial Sequence
  Cyclic GFR-binding peptide
VKPKRGVLYLISIASLA

SEQ ID NO: 2971 - protein, 15 aa, Artificial Sequence
  Cyclic GFR-binding peptide
IKPTKGIYYLITLPE

SEQ ID NO: 2972 - protein, 20 aa, Artificial Sequence
  Cyclic GFR-binding peptide
  MOD_RES (14)..(15): Xaa is C or S
YYVIPLPELDQPVXXPSASA

SEQ ID NO: 2973 - protein, 17 aa, Artificial Sequence
  Cyclic GFR-binding peptide
  MOD_RES (14)..(15): Xaa is C or S
YYVVPLPELKTPAXXPK

SEQ ID NO: 2974 - protein, 15 aa, Artificial Sequence
  Cyclic GFR-binding peptide
  MOD_RES (14)..(15): Xaa is C or S
FYLISIANLDQSVXX

SEQ ID NO: 2975 - protein, 19 aa, Artificial Sequence
  Cyclic GFR-binding peptide
VKPKRGVFYLISIANLAQP

SEQ ID NO: 2976 - protein, 15 aa, Artificial Sequence
  Cyclic GFR-binding peptide
VKPTRGVLYLISIAS

SEQ ID NO: 2977 - protein, 14 aa, Artificial Sequence
  Cyclic GFR-binding peptide
  MOD_RES (14)..(14): Xaa is C or S
FYLISIANLRTPVX

SEQ ID NO: 2978 - protein, 17 aa, Artificial Sequence
  Cyclic GFR-binding peptide
  MOD_RES (14)..(14): Xaa is C or S
FYLVSIANLKTPAXTPK

SEQ ID NO: 2979 - protein, 14 aa, Artificial Sequence
  Cyclic GFR-binding peptide
  MOD_RES (14)..(14): Xaa is C or S
LYLISIASLRTPVX

SEQ ID NO: 2980 - protein, 13 aa, Artificial Sequence
  Cyclic GFR-binding peptide
YYLITLPELDQSV

SEQ ID NO: 2981 - protein, 19 aa, Artificial Sequence
  Cyclic GFR-binding peptide
IVNSSDDIFLVSIPSLKTP

SEQ ID NO: 2982 - protein, 16 aa, Artificial Sequence
  Cyclic GFR-binding peptide
  MOD_RES (14)..(15): Xaa is C or S
LYLVSIASLKTPAXXP

SEQ ID NO: 2983 - protein, 15 aa, Artificial Sequence
  Cyclic GFR-binding peptide
VVKDYEDFYLMSIAN

SEQ ID NO: 2984 - protein, 19 aa, Artificial Sequence
  Cyclic GFR-binding peptide
  MOD_RES (14)..(15): Xaa is C or S
YYLITLPELRTPVXXTPPT

SEQ ID NO: 2985 - protein, 20 aa, Artificial Sequence
  Cyclic GFR-binding peptide
  MOD_RES (14)..(15): Xaa is C or S
YYVIPLPELRTPVXXTPPTS

SEQ ID NO: 2986 - protein, 15 aa, Artificial Sequence
  Cyclic GFR-binding peptide
VVKENEDLYLMSIAS

SEQ ID NO: 2987 - protein, 27 aa, Artificial Sequence
  Cyclic GFR-binding peptide
  MOD_RES (21)..(21): Xaa is C or S
IVNSSDDLYLVSIASLKTPAXTPKTVH

SEQ ID NO: 2988 - protein, 20 aa, Artificial Sequence
  Cyclic GFR-binding peptide
  MOD_RES (14)..(15): Xaa is C or S
FYLISIANLDQSVXXPSASA

SEQ ID NO: 2989 - protein, 13 aa, Artificial Sequence
  Cyclic GFR-binding peptide
FYLISIANLDQSV

SEQ ID NO: 2990 - protein, 14 aa, Artificial Sequence
  Cyclic GFR-binding peptide
  MOD_RES (14)..(14): Xaa is C or S
LYLVSIASLQTPAX

SEQ ID NO: 2991 - protein, 19 aa, Artificial Sequence
  Cyclic GFR-binding peptide
IVNSSDDIFLVSIPSLQTP

SEQ ID NO: 2992 - protein, 18 aa, Artificial Sequence
  Cyclic GFR-binding peptide
  MOD_RES (14)..(15): Xaa is C or S
IFLMSIPSLETPVXXAKP

SEQ ID NO: 2993 - protein, 18 aa, Artificial Sequence
  Cyclic GFR-binding peptide
  MOD_RES (14)..(15): Xaa is C or S
FYLISIANLDQPVXXPSA

SEQ ID NO: 2994 - protein, 15 aa, Artificial Sequence
  Cyclic GFR-binding peptide
VVKENEDIFLMSIPS

SEQ ID NO: 2995 - protein, 19 aa, Artificial Sequence
  Cyclic GFR-binding peptide
IVNSSDDLYLVSIASLKTP

SEQ ID NO: 2996 - protein, 16 aa, Artificial Sequence
  Cyclic GFR-binding peptide
  MOD_RES (14)..(15): Xaa is C or S
FYLISIANLDQPVXXP

SEQ ID NO: 2997 - protein, 17 aa, Artificial Sequence
  Cyclic GFR-binding peptide
  MOD_RES (14)..(15): Xaa is C or S
YYVMPLPELETPVXXAK

SEQ ID NO: 2998 - protein, 18 aa, Artificial Sequence
  Cyclic GFR-binding peptide
  MOD_RES (14)..(15): Xaa is C or S
FYLISIANLRTPVXXTPP

SEQ ID NO: 2999 - protein, 19 aa, Artificial Sequence
  Cyclic GFR-binding peptide
IKPTKGILYLISIASLDQS

SEQ ID NO: 3000 - protein, 15 aa, Artificial Sequence
  Cyclic GFR-binding peptide
  MOD_RES (14)..(15): Xaa is C or S
YYVVPLPELQTPAXX

SEQ ID NO: 3001 - protein, 27 aa, Artificial Sequence
  Cyclic GFR-binding peptide
  MOD_RES (21)..(22): Xaa is C or S
IVNSSDDYYVVPLPELKTPAXXPKPVY

SEQ ID NO: 3002 - protein, 17 aa, Artificial Sequence
  Cyclic GFR-binding peptide
  MOD_RES (14)..(15): Xaa is C or S
YYLVTLPELKTPAXXPK

SEQ ID NO: 3003 - protein, 27 aa, Artificial Sequence
  Cyclic GFR-binding peptide
  MOD_RES (21)..(22): Xaa is C or S
VKPKRGVYYLITLPELAQPVXXPAASA

SEQ ID NO: 3004 - protein, 15 aa, Artificial Sequence
  Cyclic GFR-binding peptide
  MOD_RES (14)..(15): Xaa is C or S
YYLITLPELDQSVXX

SEQ ID NO: 3005 - protein, 20 aa, Artificial Sequence
  Cyclic GFR-binding peptide
  MOD_RES (14)..(15): Xaa is C or S
YYLITLPELAQPVXXPAASA

SEQ ID NO: 3006 - protein, 19 aa, Artificial Sequence
  Cyclic GFR-binding peptide
  MOD_RES (14)..(15): Xaa is C or S
IFLISIPSLDQSVXXPSAS

SEQ ID NO: 3007 - protein, 18 aa, Artificial Sequence
  Cyclic GFR-binding peptide
VVKENEDFYLMSIANLET

SEQ ID NO: 3008 - protein, 14 aa, Artificial Sequence
  Cyclic GFR-binding peptide
  MOD_RES (14)..(14): Xaa is C or S
YYVIPLPELDQPVX

SEQ ID NO: 3009 - protein, 27 aa, Artificial Sequence
  Cyclic GFR-binding peptide
  MOD_RES (21)..(22): Xaa is C or S
VVKDYEDLYLMSIASLETPVXXAKPIS

SEQ ID NO: 3010 - protein, 19 aa, Artificial Sequence
  Cyclic GFR-binding peptide
  MOD_RES (14)..(15): Xaa is C or S
FYLISIANLDQSVXXPSAS

SEQ ID NO: 3011 - protein, 16 aa, Artificial Sequence
  Cyclic GFR-binding peptide
VKPTRGVIFLISIPSL

SEQ ID NO: 3012 - protein, 27 aa, Artificial Sequence
  Cyclic GFR-binding peptide
  MOD_RES (21)..(22): Xaa is C or S
IVNSSDDYYVVPLPELQTPAXXPKPVT

SEQ ID NO: 3013 - protein, 19 aa, Artificial Sequence
  Cyclic GFR-binding peptide
IKPTKGIFYLISIANLDQS

SEQ ID NO: 3014 - protein, 17 aa, Artificial Sequence
  Cyclic GFR-binding peptide
VVNNASDLYLISIASLR

SEQ ID NO: 3015 - protein, 18 aa, Artificial Sequence
  Cyclic GFR-binding peptide
  MOD_RES (14)..(15): Xaa is C or S
YYLVTLPELQTPAXXPKP

SEQ ID NO: 3016 - protein, 15 aa, Artificial Sequence
  Cyclic GFR-binding peptide
  MOD_RES (14)..(15): Xaa is C or S
IFLMSIPSLETPVXX

SEQ ID NO: 3017 - protein, 18 aa, Artificial Sequence
  Cyclic GFR-binding peptide
VVKENEDLYLMSIASLET

SEQ ID NO: 3018 - protein, 20 aa, Artificial Sequence
  Cyclic GFR-binding peptide
  MOD_RES (14)..(15): Xaa is C or S
YYVVPLPELQTPAXXPKPVT

SEQ ID NO: 3019 - protein, 19 aa, Artificial Sequence
  Cyclic GFR-binding peptide
VKPKRGVYYVIPLPELAQP

SEQ ID NO: 3020 - protein, 16 aa, Artificial Sequence
  Cyclic GFR-binding peptide
  MOD_RES (14)..(15): Xaa is C or S
YYVVPLPELQTPAXXP

SEQ ID NO: 3021 - protein, 18 aa, Artificial Sequence
  Cyclic GFR-binding peptide
VKPKRGVFYLISIANLAQ

SEQ ID NO: 3022 - protein, 16 aa, Artificial Sequence
  Cyclic GFR-binding peptide
IKPTKGIFYLISIANL

SEQ ID NO: 3023 - protein, 20 aa, Artificial Sequence
  Cyclic GFR-binding peptide
  MOD_RES (14)..(15): Xaa is C or S
LYLVSIASLKTPAXXPKPVY

SEQ ID NO: 3024 - protein, 16 aa, Artificial Sequence
  Cyclic GFR-binding peptide
  MOD_RES (14)..(15): Xaa is C or S
FYLISIANLAQPVXXP

SEQ ID NO: 3025 - protein, 20 aa, Artificial Sequence
  Cyclic GFR-binding peptide
  MOD_RES (14)..(15): Xaa is C or S
LYLMSIASLETPVXXAKPIS

SEQ ID NO: 3026 - protein, 18 aa, Artificial Sequence
  Cyclic GFR-binding peptide
VKPKRGVLYLISIASLAQ

SEQ ID NO: 3027 - protein, 16 aa, Artificial Sequence
  Cyclic GFR-binding peptide
IVNSSDDIFLVSIPSL

SEQ ID NO: 3028 - protein, 19 aa, Artificial Sequence
  Cyclic GFR-binding peptide
VVKENEDYYVMPLPELETP

SEQ ID NO: 3029 - protein, 15 aa, Artificial Sequence
  Cyclic GFR-binding peptide
VKPKRGVIFLISIPS

SEQ ID NO: 3030 - protein, 17 aa, Artificial Sequence
  Cyclic GFR-binding peptide
  MOD_RES (14)..(15): Xaa is C or S
LYLISIASLRTPVXXTP

SEQ ID NO: 3031 - protein, 19 aa, Artificial Sequence
  Cyclic GFR-binding peptide
  MOD_RES (14)..(15): Xaa is C or S
FYLISIANLRTPVXXTPPT

SEQ ID NO: 3032 - protein, 15 aa, Artificial Sequence
  Cyclic GFR-binding peptide
  MOD_RES (14)..(15): Xaa is C or S
LYLISIASLDQSVXX

SEQ ID NO: 3033 - protein, 17 aa, Artificial Sequence
  Cyclic GFR-binding peptide
VKPKRGVYYLITLPELA

SEQ ID NO: 3034 - protein, 19 aa, Artificial Sequence
  Cyclic GFR-binding peptide
IVNSSDDYYLVTLPELKTP

SEQ ID NO: 3035 - protein, 18 aa, Artificial Sequence
  Cyclic GFR-binding peptide
  MOD_RES (14)..(15): Xaa is C or S
YYLITLPELAQPVXXPAA

SEQ ID NO: 3036 - protein, 27 aa, Artificial Sequence
  Cyclic GFR-binding peptide
  MOD_RES (21)..(22): Xaa is C or S
IKPTKGIYYLITLPELDQSVXXPSASA

SEQ ID NO: 3037 - protein, 19 aa, Artificial Sequence
  Cyclic GFR-binding peptide
IVNSSDDYYLVTLPELQTP

SEQ ID NO: 3038 - protein, 19 aa, Artificial Sequence
  Cyclic GFR-binding peptide
  MOD_RES (14)..(15): Xaa is C or S
YYVVPLPELQTPAXXPKPV

SEQ ID NO: 3039 - protein, 20 aa, Artificial Sequence
  Cyclic GFR-binding peptide
  MOD_RES (14)..(15): Xaa is C or S
FYLISIANLRTPVXXTPPTS

SEQ ID NO: 3040 - protein, 27 aa, Artificial Sequence
  Cyclic GFR-binding peptide
  MOD_RES (21)..(22): Xaa is C or S
VKPTRGVIFLISIPSLDQPVXXPSASA

SEQ ID NO: 3041 - protein, 15 aa, Artificial Sequence
  Cyclic GFR-binding peptide
  MOD_RES (14)..(15): Xaa is C or S
YYLVTLPELQTPAXX

SEQ ID NO: 3042 - protein, 27 aa, Artificial Sequence
  Cyclic GFR-binding peptide
  MOD_RES (21)..(22): Xaa is C or S
VKPTRGVYYLITLPELDQPVXXPSASA

SEQ ID NO: 3043 - protein, 19 aa, Artificial Sequence
  Cyclic GFR-binding peptide
  MOD_RES (14)..(15): Xaa is C or S
LYLMSIASLETPVXXAKPI

SEQ ID NO: 3044 - protein, 13 aa, Artificial Sequence
  Cyclic GFR-binding peptide
FYLISIANLRTPV

SEQ ID NO: 3045 - protein, 27 aa, Artificial Sequence
  Cyclic GFR-binding peptide
  MOD_RES (21)..(22): Xaa is C or S
VVKENEDYYVMPLPELETPVXXAKPIK

SEQ ID NO: 3046 - protein, 17 aa, Artificial Sequence
  Cyclic GFR-binding peptide
  MOD_RES (14)..(15): Xaa is C or S
IFLISIPSLDQPVXXPS

SEQ ID NO: 3047 - protein, 18 aa, Artificial Sequence
  Cyclic GFR-binding peptide
IKPTKGIYYVIPLPELDQ

SEQ ID NO: 3048 - protein, 19 aa, Artificial Sequence
  Cyclic GFR-binding peptide
  MOD_RES (14)..(15): Xaa is C or S
LYLISIASLAQPVXXPAAS

SEQ ID NO: 3049 - protein, 15 aa, Artificial Sequence
  Cyclic GFR-binding peptide
  MOD_RES (14)..(15): Xaa is C or S
FYLMSIANLETPVXX

SEQ ID NO: 3050 - protein, 20 aa, Artificial Sequence
  Cyclic GFR-binding peptide
  MOD_RES (14)..(15): Xaa is C or S
LYLISIASLDQPVXXPSASA

SEQ ID NO: 3051 - protein, 16 aa, Artificial Sequence
  Cyclic GFR-binding peptide
  MOD_RES (14)..(15): Xaa is C or S
IFLISIPSLAQPVXXP

SEQ ID NO: 3052 - protein, 15 aa, Artificial Sequence
  Cyclic GFR-binding peptide
VKPKRGVYYLITLPE

SEQ ID NO: 3053 - protein, 18 aa, Artificial Sequence
  Cyclic GFR-binding peptide
  MOD_RES (14)..(15): Xaa is C or S
YYVIPLPELDQPVXXPSA

SEQ ID NO: 3054 - protein, 15 aa, Artificial Sequence
  Cyclic GFR-binding peptide
  MOD_RES (14)..(14): Xaa is C or S
LYLVSIASLKTPAXT

SEQ ID NO: 3055 - protein, 18 aa, Artificial Sequence
  Cyclic GFR-binding peptide
IVNSSDDFYLVSIANLQT

SEQ ID NO: 3056 - protein, 15 aa, Artificial Sequence
  Cyclic GFR-binding peptide
  MOD_RES (14)..(15): Xaa is C or S
LYLISIASLRTPVXX

SEQ ID NO: 3057 - protein, 13 aa, Artificial Sequence
  Cyclic GFR-binding peptide
FYLMSIANLETPV

SEQ ID NO: 3058 - protein, 18 aa, Artificial Sequence
  Cyclic GFR-binding peptide
VKPTRGVLYLISIASLDQ

SEQ ID NO: 3059 - protein, 19 aa, Artificial Sequence
  Cyclic GFR-binding peptide
VKPTRGVYYVIPLPELDQP

SEQ ID NO: 3060 - protein, 18 aa, Artificial Sequence
  Cyclic GFR-binding peptide
IVNSSDDFYLVSIANLKT

SEQ ID NO: 3061 - protein, 17 aa, Artificial Sequence
  Cyclic GFR-binding peptide
VVNNASDYYLITLPELR

SEQ ID NO: 3062 - protein, 17 aa, Artificial Sequence
  Cyclic GFR-binding peptide
VVNNASDIFLISIPSLR

SEQ ID NO: 3063 - protein, 15 aa, Artificial Sequence
  Cyclic GFR-binding peptide
VKPKRGVLYLISIAS

SEQ ID NO: 3064 - protein, 18 aa, Artificial Sequence
  Cyclic GFR-binding peptide
  MOD_RES (14)..(15): Xaa is C or S
YYLITLPELDQSVXXPSA

SEQ ID NO: 3065 - protein, 15 aa, Artificial Sequence
  Cyclic GFR-binding peptide
  MOD_RES (14)..(15): Xaa is C or S
FYLISIANLRTPVXX

SEQ ID NO: 3066 - protein, 18 aa, Artificial Sequence
  Cyclic GFR-binding peptide
  MOD_RES (14)..(14): Xaa is C or S
YYVVPLPELKTPAXTPKT

SEQ ID NO: 3067 - protein, 18 aa, Artificial Sequence
  Cyclic GFR-binding peptide
VVNNASDYYVIPLPELRT

SEQ ID NO: 3068 - protein, 16 aa, Artificial Sequence
  Cyclic GFR-binding peptide
VVKDYEDYYVMPLPEL

SEQ ID NO: 3069 - protein, 15 aa, Artificial Sequence
  Cyclic GFR-binding peptide
  MOD_RES (14)..(15): Xaa is C or S
YYLITLPELAQPVXX

SEQ ID NO: 3070 - protein, 15 aa, Artificial Sequence
  Cyclic GFR-binding peptide
IVNSSDDYYVVPLPE

SEQ ID NO: 3071 - protein, 13 aa, Artificial Sequence
  Cyclic GFR-binding peptide
YYLVTLPELKTPA

SEQ ID NO: 3072 - protein, 20 aa, Artificial Sequence
  Cyclic GFR-binding peptide
  MOD_RES (14)..(15): Xaa is C or S
YYVMPLPELETPVXXAKPIK

SEQ ID NO: 3073 - protein, 14 aa, Artificial Sequence
  Cyclic GFR-binding peptide
  MOD_RES (14)..(14): Xaa is C or S
YYLITLPELAQPVX

SEQ ID NO: 3074 - protein, 16 aa, Artificial Sequence
  Cyclic GFR-binding peptide
  MOD_RES (14)..(15): Xaa is C or S
FYLISIANLDQSVXXP

SEQ ID NO: 3075 - protein, 16 aa, Artificial Sequence
  Cyclic GFR-binding peptide
VKPKRGVFYLISIANL

SEQ ID NO: 3076 - protein, 17 aa, Artificial Sequence
  Cyclic GFR-binding peptide
  MOD_RES (14)..(15): Xaa is C or S
IFLISIPSLDQSVXXPS

SEQ ID NO: 3077 - protein, 27 aa, Artificial Sequence
  Cyclic GFR-binding peptide
  MOD_RES (21)..(21): Xaa is C or S
IVNSSDDYYLVTLPELKTPAXTPKTVH

SEQ ID NO: 3078 - protein, 14 aa, Artificial Sequence
  Cyclic GFR-binding peptide
  MOD_RES (14)..(14): Xaa is C or S
FYLMSIANLETPVX

SEQ ID NO: 3079 - protein, 17 aa, Artificial Sequence
  Cyclic GFR-binding peptide
  MOD_RES (14)..(15): Xaa is C or S
LYLISIASLDQSVXXPS

SEQ ID NO: 3080 - protein, 17 aa, Artificial Sequence
  Cyclic GFR-binding peptide
IKPTKGIYYLITLPELD

SEQ ID NO: 3081 - protein, 20 aa, Artificial Sequence
  Cyclic GFR-binding peptide
  MOD_RES (14)..(15): Xaa is C or S
FYLISIANLDQPVXXPSASA

SEQ ID NO: 3082 - protein, 15 aa, Artificial Sequence
  Cyclic GFR-binding peptide
VVKDYEDLYLMSIAS

SEQ ID NO: 3083 - protein, 27 aa, Artificial Sequence
  Cyclic GFR-binding peptide
  MOD_RES (21)..(22): Xaa is C or S
VVNNASDYYLITLPELRTPVXXTPPTS

SEQ ID NO: 3084 - protein, 16 aa, Artificial Sequence
  Cyclic GFR-binding peptide
VVNNASDFYLISIANL

SEQ ID NO: 3085 - protein, 16 aa, Artificial Sequence
  Cyclic GFR-binding peptide
IKPTKGIYYVIPLPEL

SEQ ID NO: 3086 - protein, 15 aa, Artificial Sequence
  Cyclic GFR-binding peptide
VVKENEDFYLMSIAN

SEQ ID NO: 3087 - protein, 15 aa, Artificial Sequence
  Cyclic GFR-binding peptide
  MOD_RES (14)..(15): Xaa is C or S
YYLVTLPELKTPAXX

SEQ ID NO: 3088 - protein, 19 aa, Artificial Sequence
  Cyclic GFR-binding peptide
VVNNASDYYLITLPELRTP

SEQ ID NO: 3089 - protein, 16 aa, Artificial Sequence
  Cyclic GFR-binding peptide
VKPKRGVYYVIPLPEL

SEQ ID NO: 3090 - protein, 18 aa, Artificial Sequence
  Cyclic GFR-binding peptide
IKPTKGIFYLISIANLDQ

SEQ ID NO: 3091 - protein, 20 aa, Artificial Sequence
  Cyclic GFR-binding peptide
  MOD_RES (14)..(14): Xaa is C or S
YYLVTLPELKTPAXTPKTVH

SEQ ID NO: 3092 - protein, 18 aa, Artificial Sequence
  Cyclic GFR-binding peptide
IVNSSDDYYVVPLPELKT

SEQ ID NO: 3093 - protein, 15 aa, Artificial Sequence
  Cyclic GFR-binding peptide
IKPTKGIIFLISIPS

SEQ ID NO: 3094 - protein, 14 aa, Artificial Sequence
  Cyclic GFR-binding peptide
  MOD_RES (14)..(14): Xaa is C or S
YYVVPLPELKTPAX

SEQ ID NO: 3095 - protein, 18 aa, Artificial Sequence
  Cyclic GFR-binding peptide
VVKDYEDYYLMTLPELET

SEQ ID NO: 3096 - protein, 16 aa, Artificial Sequence
  Cyclic GFR-binding peptide
  MOD_RES (14)..(15): Xaa is C or S
YYVIPLPELRTPVXXT

SEQ ID NO: 3097 - protein, 18 aa, Artificial Sequence
  Cyclic GFR-binding peptide
  MOD_RES (14)..(15): Xaa is C or S
YYVVPLPELQTPAXXPKP

SEQ ID NO: 3098 - protein, 15 aa, Artificial Sequence
  Cyclic GFR-binding peptide
VVNNASDYYLITLPE

SEQ ID NO: 3099 - protein, 16 aa, Artificial Sequence
  Cyclic GFR-binding peptide
IVNSSDDYYLVTLPEL

SEQ ID NO: 3100 - protein, 16 aa, Artificial Sequence
  Cyclic GFR-binding peptide
  MOD_RES (14)..(15): Xaa is C or S
YYLVTLPELQTPAXXP

SEQ ID NO: 3101 - protein, 17 aa, Artificial Sequence
  Cyclic GFR-binding peptide
IVNSSDDYYLVTLPELK

SEQ ID NO: 3102 - protein, 17 aa, Artificial Sequence
  Cyclic GFR-binding peptide
  MOD_RES (14)..(15): Xaa is C or S
FYLISIANLRTPVXXTP

SEQ ID NO: 3103 - protein, 16 aa, Artificial Sequence
  Cyclic GFR-binding peptide
  MOD_RES (14)..(15): Xaa is C or S
LYLISIASLDQSVXXP

SEQ ID NO: 3104 - protein, 18 aa, Artificial Sequence
  Cyclic GFR-binding peptide
IVNSSDDYYVVPLPELQT

SEQ ID NO: 3105 - protein, 17 aa, Artificial Sequence
  Cyclic GFR-binding peptide
VVKDYEDYYVMPLPELE

SEQ ID NO: 3106 - protein, 19 aa, Artificial Sequence
  Cyclic GFR-binding peptide
  MOD_RES (14)..(14): Xaa is C or S
YYVVPLPELKTPAXTPKTV

SEQ ID NO: 3107 - protein, 13 aa, Artificial Sequence
  Cyclic GFR-binding peptide
YYVVPLPELQTPA

SEQ ID NO: 3108 - protein, 16 aa, Artificial Sequence
  Cyclic GFR-binding peptide
  MOD_RES (14)..(15): Xaa is C or S
IFLISIPSLDQSVXXP

SEQ ID NO: 3109 - protein, 16 aa, Artificial Sequence
  Cyclic GFR-binding peptide
  MOD_RES (14)..(15): Xaa is C or S
YYVMPLPELETPVXXA

SEQ ID NO: 3110 - protein, 17 aa, Artificial Sequence
  Cyclic GFR-binding peptide
IVNSSDDYYLVTLPELQ

SEQ ID NO: 3111 - protein, 27 aa, Artificial Sequence
  Cyclic GFR-binding peptide
  MOD_RES (21)..(22): Xaa is C or S
VVKDYEDYYLMTLPELETPVXXAKPIS

SEQ ID NO: 3112 - protein, 18 aa, Artificial Sequence
  Cyclic GFR-binding peptide
  MOD_RES (14)..(15): Xaa is C or S
LYLISIASLRTPVXXTPP

SEQ ID NO: 3113 - protein, 18 aa, Artificial Sequence
  Cyclic GFR-binding peptide
VKPTRGVIFLISIPSLDQ

SEQ ID NO: 3114 - protein, 14 aa, Artificial Sequence
  Cyclic GFR-binding peptide
  MOD_RES (14)..(14): Xaa is C or S
IFLMSIPSLETPVX

SEQ ID NO: 3115 - protein, 17 aa, Artificial Sequence
  Cyclic GFR-binding peptide
  MOD_RES (14)..(15): Xaa is C or S
FYLISIANLDQSVXXPS

SEQ ID NO: 3116 - protein, 14 aa, Artificial Sequence
  Cyclic GFR-binding peptide
  MOD_RES (14)..(14): Xaa is C or S
LYLMSIASLETPVX

SEQ ID NO: 3117 - protein, 19 aa, Artificial Sequence
  Cyclic GFR-binding peptide
VVKDYEDFYLMSIANLETP

SEQ ID NO: 3118 - protein, 13 aa, Artificial Sequence
  Cyclic GFR-binding peptide
APTKLSPISVLFI

SEQ ID NO: 3119 - protein, 15 aa, Artificial Sequence
  Cyclic GFR-binding peptide
NAISILYFIGKTPKI

SEQ ID NO: 3120 - protein, 13 aa, Artificial Sequence
  Cyclic GFR-binding peptide
APTQLSAISVLYL

SEQ ID NO: 3121 - protein, 14 aa, Artificial Sequence
  Cyclic GFR-binding peptide
  MOD_RES (1)..(1): Xaa is C or S
XVPQALSPISILFI

SEQ ID NO: 3122 - protein, 20 aa, Artificial Sequence
  Cyclic GFR-binding peptide
  MOD_RES (7)..(7): Xaa is C or S
HVTKPTXAPTKLSPISVLFI

SEQ ID NO: 3123 - protein, 27 aa, Artificial Sequence
  Cyclic GFR-binding peptide
  MOD_RES (6)..(7): Xaa is C or S
SIPKAXXVPTELEPLPMVYYDEYDKVV

SEQ ID NO: 3124 - protein, 13 aa, Artificial Sequence
  Cyclic GFR-binding peptide
VPQDLEPLPIVYY

SEQ ID NO: 3125 - protein, 19 aa, Artificial Sequence
  Cyclic GFR-binding peptide
  MOD_RES (5)..(6): Xaa is C or S
VPKPXXAPTKLEPLTVLYY

SEQ ID NO: 3126 - protein, 17 aa, Artificial Sequence
  Cyclic GFR-binding peptide
KLSAISVLYLDDSSNVI

SEQ ID NO: 3127 - protein, 19 aa, Artificial Sequence
  Cyclic GFR-binding peptide
  MOD_RES (5)..(6): Xaa is C or S
SASPXXVSQDLSAISILYL

SEQ ID NO: 3128 - protein, 17 aa, Artificial Sequence
  Cyclic GFR-binding peptide
RLEPLPIVYYDSANNVV

SEQ ID NO: 3129 - protein, 15 aa, Artificial Sequence
  Cyclic GFR-binding peptide
SPISILFIVGRTPKV

SEQ ID NO: 3130 - protein, 17 aa, Artificial Sequence
  Cyclic GFR-binding peptide
  MOD_RES (3)..(4): Xaa is C or S
KPXXAPTQLEPLTVLYY

SEQ ID NO: 3131 - protein, 18 aa, Artificial Sequence
  Cyclic GFR-binding peptide
  MOD_RES (5)..(5): Xaa is C or S
TKPTXAPTKLEPLTVLYY

SEQ ID NO: 3132 - protein, 16 aa, Artificial Sequence
  Cyclic GFR-binding peptide
  MOD_RES (2)..(3): Xaa is C or S
PXXAPTKLEPLPVVYY

SEQ ID NO: 3133 - protein, 15 aa, Artificial Sequence
  Cyclic GFR-binding peptide
SPISMLFIDEYDKVV

SEQ ID NO: 3134 - protein, 13 aa, Artificial Sequence
  Cyclic GFR-binding peptide
VPTRLSAISILYL

SEQ ID NO: 3135 - protein, 16 aa, Artificial Sequence
  Cyclic GFR-binding peptide
  MOD_RES (3)..(3): Xaa is C or S
PTXAPTKLEPLTVLYY

SEQ ID NO: 3136 - protein, 13 aa, Artificial Sequence
  Cyclic GFR-binding peptide
VPQALSAISILYL

SEQ ID NO: 3137 - protein, 19 aa, Artificial Sequence
  Cyclic GFR-binding peptide
  MOD_RES (5)..(6): Xaa is C or S
SASPXXVPQDLSPISILFI

SEQ ID NO: 3138 - protein, 20 aa, Artificial Sequence
  Cyclic GFR-binding peptide
  MOD_RES (6)..(7): Xaa is C or S
YVPKPXXAPTKLSPISVLFI

SEQ ID NO: 3139 - protein, 15 aa, Artificial Sequence
  Cyclic GFR-binding peptide
SAISILYLIGKTPKI

SEQ ID NO: 3140 - protein, 16 aa, Artificial Sequence
  Cyclic GFR-binding peptide
  MOD_RES (2)..(3): Xaa is C or S
AXXVPTELSPISMLFI

SEQ ID NO: 3141 - protein, 20 aa, Artificial Sequence
  Cyclic GFR-binding peptide
  MOD_RES (6)..(7): Xaa is C or S
SIPKAXXVPTELSPISMLFI

SEQ ID NO: 3142 - protein, 13 aa, Artificial Sequence
  Cyclic GFR-binding peptide
VPTELEPLTMLYY

SEQ ID NO: 3143 - protein, 19 aa, Artificial Sequence
  Cyclic GFR-binding peptide
  MOD_RES (5)..(6): Xaa is C or S
VPKPXXAPTKLEPLPVVYY

SEQ ID NO: 3144 - protein, 15 aa, Artificial Sequence
  Cyclic GFR-binding peptide
  MOD_RES (1)..(2): Xaa is C or S
XXVPTELEPLTMLYY

SEQ ID NO: 3145 - protein, 15 aa, Artificial Sequence
  Cyclic GFR-binding peptide
  MOD_RES (1)..(2): Xaa is C or S
XXVSQDLSPISILFI

SEQ ID NO: 3146 - protein, 16 aa, Artificial Sequence
  Cyclic GFR-binding peptide
  MOD_RES (2)..(3): Xaa is C or S
PXXVPQDLEPLPIVYY

SEQ ID NO: 3147 - protein, 18 aa, Artificial Sequence
  Cyclic GFR-binding peptide
TKLSPISVLFIDDSSNVI

SEQ ID NO: 3148 - protein, 17 aa, Artificial Sequence
  Cyclic GFR-binding peptide
  MOD_RES (4)..(4): Xaa is C or S
KPTXAPTKLSPISVLFI

SEQ ID NO: 3149 - protein, 20 aa, Artificial Sequence
  Cyclic GFR-binding peptide
  MOD_RES (6)..(7): Xaa is C or S
ASASPXXVSQDLEPLPIVYY

SEQ ID NO: 3150 - protein, 20 aa, Artificial Sequence
  Cyclic GFR-binding peptide
  MOD_RES (6)..(7): Xaa is C or S
STPPTXXVPTRLSAISILYL

SEQ ID NO: 3151 - protein, 17 aa, Artificial Sequence
  Cyclic GFR-binding peptide
  MOD_RES (3)..(4): Xaa is C or S
KPXXAPTQLEPLPVVYY

SEQ ID NO: 3152 - protein, 17 aa, Artificial Sequence
  Cyclic GFR-binding peptide
DLEPLPIVYYVGRTPKV

SEQ ID NO: 3153 - protein, 14 aa, Artificial Sequence
  Cyclic GFR-binding peptide
  MOD_RES (1)..(1): Xaa is C or S
XAPTQLEPLPVVYY

SEQ ID NO: 3154 - protein, 18 aa, Artificial Sequence
  Cyclic GFR-binding peptide
TELEPLTMLYYDENEKVV

SEQ ID NO: 3155 - protein, 16 aa, Artificial Sequence
  Cyclic GFR-binding peptide
LSPISILFIIGKTPKI

SEQ ID NO: 3156 - protein, 17 aa, Artificial Sequence
  Cyclic GFR-binding peptide
  MOD_RES (4)..(4): Xaa is C or S
KPTXAPTKLEPLPVVYY

SEQ ID NO: 3157 - protein, 18 aa, Artificial Sequence
  Cyclic GFR-binding peptide
TQLSPISVLFIDDSSNVI

SEQ ID NO: 3158 - protein, 19 aa, Artificial Sequence
  Cyclic GFR-binding peptide
  MOD_RES (5)..(6): Xaa is C or S
IPKAXXVPTELSPISMLFI

SEQ ID NO: 3159 - protein, 18 aa, Artificial Sequence
  Cyclic GFR-binding peptide
TELSPISMLFIDENEKVV

SEQ ID NO: 3160 - protein, 17 aa, Artificial Sequence
  Cyclic GFR-binding peptide
QLSAISVLYLDDSSNVI

SEQ ID NO: 3161 - protein, 15 aa, Artificial Sequence
  Cyclic GFR-binding peptide
NAISILYFDSANNVV

SEQ ID NO: 3162 - protein, 19 aa, Artificial Sequence
  Cyclic GFR-binding peptide
  MOD_RES (5)..(6): Xaa is C or S
TPPTXXVPTRLSAISILYL

SEQ ID NO: 3163 - protein, 16 aa, Artificial Sequence
  Cyclic GFR-binding peptide
  MOD_RES (3)..(3): Xaa is C or S
PTXAPTKLEPLPVVYY

SEQ ID NO: 3164 - protein, 17 aa, Artificial Sequence
  Cyclic GFR-binding peptide
  MOD_RES (3)..(4): Xaa is C or S
SPXXVSQDLEPLPIVYY

SEQ ID NO: 3165 - protein, 16 aa, Artificial Sequence
  Cyclic GFR-binding peptide
  MOD_RES (2)..(3): Xaa is C or S
PXXAPTKLEPLTVLYY

SEQ ID NO: 3166 - protein, 19 aa, Artificial Sequence
  Cyclic GFR-binding peptide
PTKLEPLPVVYYDDSSNVI

SEQ ID NO: 3167 - protein, 15 aa, Artificial Sequence
  Cyclic GFR-binding peptide
EPLPMVYYDENEKVV

SEQ ID NO: 3168 - protein, 19 aa, Artificial Sequence
  Cyclic GFR-binding peptide
  MOD_RES (5)..(6): Xaa is C or S
SAAPXXVPQALSPISILFI

SEQ ID NO: 3169 - protein, 16 aa, Artificial Sequence
  Cyclic GFR-binding peptide
LNAISMLYFDENEKVV

SEQ ID NO: 3170 - protein, 14 aa, Artificial Sequence
  Cyclic GFR-binding peptide
  MOD_RES (1)..(1): Xaa is C or S
XVPTRLEPLPIVYY

SEQ ID NO: 3171 - protein, 19 aa, Artificial Sequence
  Cyclic GFR-binding peptide
PTQLEPLPVVYYDDSSNVI

SEQ ID NO: 3172 - protein, 15 aa, Artificial Sequence
  Cyclic GFR-binding peptide
SAISILYLDSANNVV

SEQ ID NO: 3173 - protein, 20 aa, Artificial Sequence
  Cyclic GFR-binding peptide
  MOD_RES (6)..(7): Xaa is C or S
KIPKAXXVPTELEPLTMLYY

SEQ ID NO: 3174 - protein, 16 aa, Artificial Sequence
  Cyclic GFR-binding peptide
  MOD_RES (2)..(3): Xaa is C or S
PXXVPQALSAISILYL

SEQ ID NO: 3175 - protein, 15 aa, Artificial Sequence
  Cyclic GFR-binding peptide
EPLTMLYYDEYDKVV

SEQ ID NO: 3176 - protein, 16 aa, Artificial Sequence
  Cyclic GFR-binding peptide
  MOD_RES (2)..(3): Xaa is C or S
PXXAPTQLSAISVLYL

SEQ ID NO: 3177 - protein, 15 aa, Artificial Sequence
  Cyclic GFR-binding peptide
  MOD_RES (1)..(2): Xaa is C or S
XXAPTKLEPLPVVYY

SEQ ID NO: 3178 - protein, 13 aa, Artificial Sequence
  Cyclic GFR-binding peptide
VPQDLSPISILFI

SEQ ID NO: 3179 - protein, 15 aa, Artificial Sequence
  Cyclic GFR-binding peptide
  MOD_RES (2)..(2): Xaa is C or S
TXAPTKLSPISVLFI

SEQ ID NO: 3180 - protein, 13 aa, Artificial Sequence
  Cyclic GFR-binding peptide
APTKLEPLPVVYY

SEQ ID NO: 3181 - protein, 13 aa, Artificial Sequence
  Cyclic GFR-binding peptide
VPTELSPISMLFI

SEQ ID NO: 3182 - protein, 17 aa, Artificial Sequence
  Cyclic GFR-binding peptide
ELSPISMLFIDEYDKVV

SEQ ID NO: 3183 - protein, 20 aa, Artificial Sequence
  Cyclic GFR-binding peptide
  MOD_RES (6)..(7): Xaa is C or S
SIPKAXXVPTELEPLPMVYY

SEQ ID NO: 3184 - protein, 16 aa, Artificial Sequence
  Cyclic GFR-binding peptide
  MOD_RES (2)..(3): Xaa is C or S
TXXVPTRLEPLTILYY

SEQ ID NO: 3185 - protein, 27 aa, Artificial Sequence
  Cyclic GFR-binding peptide
  MOD_RES (6)..(7): Xaa is C or S
TVPKPXXAPTQLSPISVLFIDDSSNVI

SEQ ID NO: 3186 - protein, 15 aa, Artificial Sequence
  Cyclic GFR-binding peptide
NAISILYFVGRKPKV

SEQ ID NO: 3187 - protein, 14 aa, Artificial Sequence
  Cyclic GFR-binding peptide
  MOD_RES (1)..(1): Xaa is C or S
XVPTRLEPLTILYY

SEQ ID NO: 3188 - protein, 18 aa, Artificial Sequence
  Cyclic GFR-binding peptide
TRLNAISILYFDSANNVV

SEQ ID NO: 3189 - protein, 14 aa, Artificial Sequence
  Cyclic GFR-binding peptide
  MOD_RES (1)..(1): Xaa is C or S
XAPTKLEPLTVLYY

SEQ ID NO: 3190 - protein, 16 aa, Artificial Sequence
  Cyclic GFR-binding peptide
LSAISVLYLDDSSNVI

SEQ ID NO: 3191 - protein, 16 aa, Artificial Sequence
  Cyclic GFR-binding peptide
  MOD_RES (3)..(3): Xaa is C or S
PTXAPTKLSPISVLFI

SEQ ID NO: 3192 - protein, 17 aa, Artificial Sequence
  Cyclic GFR-binding peptide
  MOD_RES (4)..(4): Xaa is C or S
KPTXAPTKLEPLTVLYY

SEQ ID NO: 3193 - protein, 14 aa, Artificial Sequence
  Cyclic GFR-binding peptide
  MOD_RES (1)..(1): Xaa is C or S
XVSQDLSPISILFI

SEQ ID NO: 3194 - protein, 19 aa, Artificial Sequence
  Cyclic GFR-binding peptide
PQALEPLTILYYVGRKPKV

SEQ ID NO: 3195 - protein, 17 aa, Artificial Sequence
  Cyclic GFR-binding peptide
ELEPLPMVYYDENEKVV

SEQ ID NO: 3196 - protein, 19 aa, Artificial Sequence
  Cyclic GFR-binding peptide
  MOD_RES (6)..(6): Xaa is C or S
VTKPTXAPTKLEPLTVLYY

SEQ ID NO: 3197 - protein, 18 aa, Artificial Sequence
  Cyclic GFR-binding peptide
QALSPISILFIVGRKPKV

SEQ ID NO: 3198 - protein, 15 aa, Artificial Sequence
  Cyclic GFR-binding peptide
  MOD_RES (2)..(2): Xaa is C or S
TXAPTKLEPLPVVYY

SEQ ID NO: 3199 - protein, 16 aa, Artificial Sequence
  Cyclic GFR-binding peptide
  MOD_RES (2)..(3): Xaa is C or S
AXXVPTELEPLTMLYY

SEQ ID NO: 3200 - protein, 13 aa, Artificial Sequence
  Cyclic GFR-binding peptide
VSQDLSAISILYL

SEQ ID NO: 3201 - protein, 20 aa, Artificial Sequence
  Cyclic GFR-binding peptide
  MOD_RES (6)..(7): Xaa is C or S
ASASPXXVSQDLSPISILFI

SEQ ID NO: 3202 - protein, 18 aa, Artificial Sequence
  Cyclic GFR-binding peptide
QALEPLTILYYVGRKPKV

SEQ ID NO: 3203 - protein, 16 aa, Artificial Sequence
  Cyclic GFR-binding peptide
LEPLPIVYYVGRTPKV

SEQ ID NO: 3204 - protein, 14 aa, Artificial Sequence
  Cyclic GFR-binding peptide
  MOD_RES (1)..(1): Xaa is C or S
XAPTQLEPLTVLYY

SEQ ID NO: 3205 - protein, 15 aa, Artificial Sequence
  Cyclic GFR-binding peptide
  MOD_RES (1)..(2): Xaa is C or S
XXVPQDLEPLPIVYY

SEQ ID NO: 3206 - protein, 13 aa, Artificial Sequence
  Cyclic GFR-binding peptide
VSQDLSPISILFI

SEQ ID NO: 3207 - protein, 17 aa, Artificial Sequence
  Cyclic GFR-binding peptide
  MOD_RES (3)..(4): Xaa is C or S
SPXXVPQDLNAISILYF

SEQ ID NO: 3208 - protein, 18 aa, Artificial Sequence
  Cyclic GFR-binding peptide
  MOD_RES (4)..(5): Xaa is C or S
ASPXXVPQDLSPISILFI

SEQ ID NO: 3209 - protein, 18 aa, Artificial Sequence
  Cyclic GFR-binding peptide
  MOD_RES (4)..(5): Xaa is C or S
ASPXXVPQDLSAISILYL

SEQ ID NO: 3210 - protein, 20 aa, Artificial Sequence
  Cyclic GFR-binding peptide
  MOD_RES (7)..(7): Xaa is C or S
HVTKPTXAPTKLEPLPVVYY

SEQ ID NO: 3211 - protein, 16 aa, Artificial Sequence
  Cyclic GFR-binding peptide
LSPISILFIVGRKPKV

SEQ ID NO: 3212 - protein, 19 aa, Artificial Sequence
  Cyclic GFR-binding peptide
  MOD_RES (5)..(6): Xaa is C or S
IPKAXXVPTELEPLTMLYY

SEQ ID NO: 3213 - protein, 15 aa, Artificial Sequence
  Cyclic GFR-binding peptide
  MOD_RES (1)..(2): Xaa is C or S
XXVPQALSAISILYL

SEQ ID NO: 3214 - protein, 15 aa, Artificial Sequence
  Cyclic GFR-binding peptide
  MOD_RES (1)..(2): Xaa is C or S
XXVPQALSPISILFI

SEQ ID NO: 3215 - protein, 16 aa, Artificial Sequence
  Cyclic GFR-binding peptide
  MOD_RES (2)..(3): Xaa is C or S
PXXVPQDLSPISILFI

SEQ ID NO: 3216 - protein, 17 aa, Artificial Sequence
  Cyclic GFR-binding peptide
  MOD_RES (3)..(4): Xaa is C or S
KAXXVPTELEPLTMLYY

SEQ ID NO: 3217 - protein, 19 aa, Artificial Sequence
  Cyclic GFR-binding peptide
PTELEPLTMLYYDENEKVV

SEQ ID NO: 3218 - protein, 27 aa, Artificial Sequence
  Cyclic GFR-binding peptide
  MOD_RES (6)..(7): Xaa is C or S
ASASPXXVSQDLSPISILFIIGKTPKI

SEQ ID NO: 3219 - protein, 16 aa, Artificial Sequence
  Cyclic GFR-binding peptide
  MOD_RES (2)..(3): Xaa is C or S
PXXAPTKLSPISVLFI

SEQ ID NO: 3220 - protein, 27 aa, Artificial Sequence
  Cyclic GFR-binding peptide
  MOD_RES (6)..(7): Xaa is C or S
ASAAPXXVPQALSAISILYLVGRKPKV

SEQ ID NO: 3221 - protein, 18 aa, Artificial Sequence
  Cyclic GFR-binding peptide
  MOD_RES (4)..(5): Xaa is C or S
PKAXXVPTELNAISMLYF

SEQ ID NO: 3222 - protein, 17 aa, Artificial Sequence
  Cyclic GFR-binding peptide
  MOD_RES (3)..(4): Xaa is C or S
APXXVPQALEPLTILYY

SEQ ID NO: 3223 - protein, 19 aa, Artificial Sequence
  Cyclic GFR-binding peptide
  MOD_RES (5)..(6): Xaa is C or S
SASPXXVPQDLEPLPIVYY

SEQ ID NO: 3224 - protein, 19 aa, Artificial Sequence
  Cyclic GFR-binding peptide
SQDLSPISILFIIGKTPKI

SEQ ID NO: 3225 - protein, 27 aa, Artificial Sequence
  Cyclic GFR-binding peptide
  MOD_RES (6)..(7): Xaa is C or S
YVPKPXXAPTKLEPLTVLYYDDSSNVI

SEQ ID NO: 3226 - protein, 18 aa, Artificial Sequence
  Cyclic GFR-binding peptide
QDLSAISILYLIGKTPKI

SEQ ID NO: 3227 - protein, 19 aa, Artificial Sequence
  Cyclic GFR-binding peptide
PTELSPISMLFIDEYDKVV

SEQ ID NO: 3228 - protein, 14 aa, Artificial Sequence
  Cyclic GFR-binding peptide
  MOD_RES (1)..(1): Xaa is C or S
XAPTQLSPISVLFI

SEQ ID NO: 3229 - protein, 19 aa, Artificial Sequence
  Cyclic GFR-binding peptide
  MOD_RES (5)..(6): Xaa is C or S
VPKPXXAPTQLSPISVLFI

SEQ ID NO: 3230 - protein, 27 aa, Artificial Sequence
  Cyclic GFR-binding peptide
  MOD_RES (6)..(7): Xaa is C or S
ASASPXXVSQDLSAISILYLIGKTPKI

SEQ ID NO: 3231 - protein, 17 aa, Artificial Sequence
  Cyclic GFR-binding peptide
DLNAISILYFVGRTPKV

SEQ ID NO: 3232 - protein, 17 aa, Artificial Sequence
  Cyclic GFR-binding peptide
  MOD_RES (3)..(4): Xaa is C or S
KAXXVPTELNAISMLYF

SEQ ID NO: 3233 - protein, 17 aa, Artificial Sequence
  Cyclic GFR-binding peptide
DLSPISILFIIGKTPKI

SEQ ID NO: 3234 - protein, 20 aa, Artificial Sequence
  Cyclic GFR-binding peptide
  MOD_RES (6)..(7): Xaa is C or S
TVPKPXXAPTQLSPISVLFI

SEQ ID NO: 3235 - protein, 17 aa, Artificial Sequence
  Cyclic GFR-binding peptide
  MOD_RES (3)..(4): Xaa is C or S
APXXVPQALNAISILYF

SEQ ID NO: 3236 - protein, 14 aa, Artificial Sequence
  Cyclic GFR-binding peptide
  MOD_RES (1)..(1): Xaa is C or S
XVSQDLEPLPIVYY

SEQ ID NO: 3237 - protein, 20 aa, Artificial Sequence
  Cyclic GFR-binding peptide
  MOD_RES (6)..(7): Xaa is C or S
TVPKPXXAPTQLSAISVLYL

SEQ ID NO: 3238 - protein, 18 aa, Artificial Sequence
  Cyclic GFR-binding peptide
  MOD_RES (4)..(5): Xaa is C or S
AAPXXVPQALSAISILYL

SEQ ID NO: 3239 - protein, 13 aa, Artificial Sequence
  Cyclic GFR-binding peptide
VPTELEPLPMVYY

SEQ ID NO: 3240 - protein, 18 aa, Artificial Sequence
  Cyclic GFR-binding peptide
  MOD_RES (4)..(5): Xaa is C or S
AAPXXVPQALSPISILFI

SEQ ID NO: 3241 - protein, 19 aa, Artificial Sequence
  Cyclic GFR-binding peptide
  MOD_RES (5)..(6): Xaa is C or S
VPKPXXAPTQLSAISVLYL

SEQ ID NO: 3242 - protein, 15 aa, Artificial Sequence
  Cyclic GFR-binding peptide
  MOD_RES (1)..(2): Xaa is C or S
XXVPTELEPLPMVYY

SEQ ID NO: 3243 - protein, 16 aa, Artificial Sequence
  Cyclic GFR-binding peptide
LSAISILYLDSANNVV

SEQ ID NO: 3244 - protein, 27 aa, Artificial Sequence
  Cyclic GFR-binding peptide
  MOD_RES (7)..(7): Xaa is C or S
HVTKPTXAPTKLSPISVLFIDDSSNVI

SEQ ID NO: 3245 - protein, 13 aa, Artificial Sequence
  Cyclic GFR-binding peptide
APTQLSPISVLFI

SEQ ID NO: 3246 - protein, 14 aa, Artificial Sequence
  Cyclic GFR-binding peptide
  MOD_RES (1)..(1): Xaa is C or S
XVPQALSAISILYL

SEQ ID NO: 3247 - protein, 20 aa, Artificial Sequence
  Cyclic GFR-binding peptide
  MOD_RES (7)..(7): Xaa is C or S
HVTKPTXAPTKLSAISVLYL

SEQ ID NO: 3248 - protein, 18 aa, Artificial Sequence
  Cyclic GFR-binding peptide
QDLSPISILFIIGKTPKI

SEQ ID NO: 3249 - protein, 16 aa, Artificial Sequence
  Cyclic GFR-binding peptide
LEPLTMLYYDEYDKVV

SEQ ID NO: 3250 - protein, 16 aa, Artificial Sequence
  Cyclic GFR-binding peptide
LEPLPMVYYDENEKVV

SEQ ID NO: 3251 - protein, 13 aa, Artificial Sequence
  Cyclic GFR-binding peptide
APTKLSAISVLYL

SEQ ID NO: 3252 - protein, 16 aa, Artificial Sequence
  Cyclic GFR-binding peptide
LSPISMLFIDEYDKVV

SEQ ID NO: 3253 - protein, 17 aa, Artificial Sequence
  Cyclic GFR-binding peptide
QLEPLPVVYYDDSSNVI

SEQ ID NO: 3254 - protein, 13 aa, Artificial Sequence
  Cyclic GFR-binding peptide
VSQDLEPLPIVYY

SEQ ID NO: 3255 - protein, 17 aa, Artificial Sequence
  Cyclic GFR-binding peptide
DLEPLPIVYYIGKTPKI

SEQ ID NO: 3256 - protein, 27 aa, Artificial Sequence
  Cyclic GFR-binding peptide
  MOD_RES (6)..(7): Xaa is C or S
ASAAPXXVPQALSPISILFIVGRKPKV

SEQ ID NO: 3257 - protein, 17 aa, Artificial Sequence
  Cyclic GFR-binding peptide
KLEPLPVVYYDDSSNVI

SEQ ID NO: 3258 - protein, 19 aa, Artificial Sequence
  Cyclic GFR-binding peptide
  MOD_RES (5)..(6): Xaa is C or S
VPKPXXAPTQLEPLTVLYY

SEQ ID NO: 3259 - protein, 14 aa, Artificial Sequence
  Cyclic GFR-binding peptide
  MOD_RES (1)..(1): Xaa is C or S
XVPTELEPLTMLYY

SEQ ID NO: 3260 - protein, 15 aa, Artificial Sequence
  Cyclic GFR-binding peptide
EPLPIVYYIGKTPKI

SEQ ID NO: 3261 - protein, 27 aa, Artificial Sequence
  Cyclic GFR-binding peptide
  MOD_RES (6)..(7): Xaa is C or S
STPPTXXVPTRLEPLPIVYYDSANNVV

SEQ ID NO: 3262 - protein, 15 aa, Artificial Sequence
  Cyclic GFR-binding peptide
  MOD_RES (1)..(2): Xaa is C or S
XXVPTRLEPLPIVYY

SEQ ID NO: 3263 - protein, 27 aa, Artificial Sequence
  Cyclic GFR-binding peptide
  MOD_RES (6)..(7): Xaa is C or S
SIPKAXXVPTELNAISMLYFDEYDKVV

SEQ ID NO: 3264 - protein, 27 aa, Artificial Sequence
  Cyclic GFR-binding peptide
  MOD_RES (6)..(7): Xaa is C or S
ASASPXXVPQDLEPLPIVYYVGRTPKV

SEQ ID NO: 3265 - protein, 20 aa, Artificial Sequence
  Cyclic GFR-binding peptide
  MOD_RES (6)..(7): Xaa is C or S
YVPKPXXAPTKLEPLTVLYY

SEQ ID NO: 3266 - protein, 14 aa, Artificial Sequence
  Cyclic GFR-binding peptide
  MOD_RES (1)..(1): Xaa is C or S
XVPTELEPLPMVYY

SEQ ID NO: 3267 - protein, 19 aa, Artificial Sequence
  Cyclic GFR-binding peptide
PTELEPLTMLYYDEYDKVV

SEQ ID NO: 3268 - protein, 17 aa, Artificial Sequence
  Cyclic GFR-binding peptide
  MOD_RES (3)..(4): Xaa is C or S
SPXXVPQDLEPLPIVYY

SEQ ID NO: 3269 - protein, 19 aa, Artificial Sequence
  Cyclic GFR-binding peptide
  MOD_RES (5)..(6): Xaa is C or S
SASPXXVPQDLSAISILYL

SEQ ID NO: 3270 - protein, 13 aa, Artificial Sequence
  Cyclic GFR-binding peptide
VPQALSPISILFI

SEQ ID NO: 3271 - protein, 16 aa, Artificial Sequence
  Cyclic GFR-binding peptide
LSAISILYLIGKTPKI

SEQ ID NO: 3272 - protein, 27 aa, Artificial Sequence
  Cyclic GFR-binding peptide
  MOD_RES (6)..(7): Xaa is C or S
KIPKAXXVPTELEPLTMLYYDENEKVV

SEQ ID NO: 3273 - protein, 17 aa, Artificial Sequence
  Cyclic GFR-binding peptide
  MOD_RES (4)..(4): Xaa is C or S
KPTXAPTKLSAISVLYL

SEQ ID NO: 3274 - protein, 16 aa, Artificial Sequence
  Cyclic GFR-binding peptide
  MOD_RES (2)..(3): Xaa is C or S
PXXVSQDLEPLPIVYY

SEQ ID NO: 3275 - protein, 15 aa, Artificial Sequence
  Cyclic GFR-binding peptide
  MOD_RES (1)..(2): Xaa is C or S
XXVPQDLNAISILYF

SEQ ID NO: 3276 - protein, 20 aa, Artificial Sequence
  Cyclic GFR-binding peptide
  MOD_RES (6)..(7): Xaa is C or S
SIPKAXXVPTELEPLTMLYY

SEQ ID NO: 3277 - protein, 17 aa, Artificial Sequence
  Cyclic GFR-binding peptide
RLNAISILYFDSANNVV

SEQ ID NO: 3278 - protein, 16 aa, Artificial Sequence
  Cyclic GFR-binding peptide
  MOD_RES (2)..(3): Xaa is C or S
TXXVPTRLNAISILYF

SEQ ID NO: 3279 - protein, 17 aa, Artificial Sequence
  Cyclic GFR-binding peptide
ALSPISILFIVGRKPKV

SEQ ID NO: 3280 - protein, 20 aa, Artificial Sequence
  Cyclic GFR-binding peptide
  MOD_RES (6)..(7): Xaa is C or S
KIPKAXXVPTELNAISMLYF

SEQ ID NO: 3281 - protein, 15 aa, Artificial Sequence
  Cyclic GFR-binding peptide
  MOD_RES (1)..(2): Xaa is C or S
XXVSQDLEPLPIVYY

SEQ ID NO: 3282 - protein, 18 aa, Artificial Sequence
  Cyclic GFR-binding peptide
TRLEPLTILYYDSANNVV

SEQ ID NO: 3283 - protein, 17 aa, Artificial Sequence
  Cyclic GFR-binding peptide
ELNAISMLYFDENEKVV

SEQ ID NO: 3284 - protein, 20 aa, Artificial Sequence
  Cyclic GFR-binding peptide
  MOD_RES (6)..(7): Xaa is C or S
TVPKPXXAPTQLEPLTVLYY

SEQ ID NO: 3285 - protein, 18 aa, Artificial Sequence
  Cyclic GFR-binding peptide
QDLEPLPIVYYVGRTPKV

SEQ ID NO: 3286 - protein, 19 aa, Artificial Sequence
  Cyclic GFR-binding peptide
PQDLSPISILFIVGRTPKV

SEQ ID NO: 3287 - protein, 27 aa, Artificial Sequence
  Cyclic GFR-binding peptide
  MOD_RES (6)..(7): Xaa is C or S
YVPKPXXAPTKLSPISVLFIDDSSNVI

SEQ ID NO: 3288 - protein, 14 aa, Artificial Sequence
  Cyclic GFR-binding peptide
  MOD_RES (1)..(1): Xaa is C or S
XAPTKLSPISVLFI

SEQ ID NO: 3289 - protein, 17 aa, Artificial Sequence
  Cyclic GFR-binding peptide
  MOD_RES (3)..(4): Xaa is C or S
KPXXAPTKLSAISVLYL

SEQ ID NO: 3290 - protein, 27 aa, Artificial Sequence
  Cyclic GFR-binding peptide
  MOD_RES (7)..(7): Xaa is C or S
HVTKPTXAPTKLEPLPVVYYDDSSNVI

SEQ ID NO: 3291 - protein, 16 aa, Artificial Sequence
  Cyclic GFR-binding peptide
LSPISMLFIDENEKVV

SEQ ID NO: 3292 - protein, 15 aa, Artificial Sequence
  Cyclic GFR-binding peptide
  MOD_RES (1)..(2): Xaa is C or S
XXVPTRLEPLTILYY

SEQ ID NO: 3293 - protein, 16 aa, Artificial Sequence
  Cyclic GFR-binding peptide
  MOD_RES (2)..(3): Xaa is C or S
PXXAPTQLSPISVLFI

SEQ ID NO: 3294 - protein, 19 aa, Artificial Sequence
  Cyclic GFR-binding peptide
  MOD_RES (5)..(6): Xaa is C or S
VPKPXXAPTKLSPISVLFI

SEQ ID NO: 3295 - protein, 15 aa, Artificial Sequence
  Cyclic GFR-binding peptide
  MOD_RES (1)..(2): Xaa is C or S
XXVPQDLSPISILFI

SEQ ID NO: 3296 - protein, 15 aa, Artificial Sequence
  Cyclic GFR-binding peptide
  MOD_RES (1)..(2): Xaa is C or S
XXVPQALNAISILYF

SEQ ID NO: 3297 - protein, 13 aa, Artificial Sequence
  Cyclic GFR-binding peptide
VPQDLSAISILYL

SEQ ID NO: 3298 - protein, 13 aa, Artificial Sequence
  Cyclic GFR-binding peptide
VPQALNAISILYF

SEQ ID NO: 3299 - protein, 19 aa, Artificial Sequence
  Cyclic GFR-binding peptide
  MOD_RES (5)..(6): Xaa is C or S
SAAPXXVPQALEPLTILYY

SEQ ID NO: 3300 - protein, 19 aa, Artificial Sequence
  Cyclic GFR-binding peptide
PQDLSAISILYLVGRTPKV

SEQ ID NO: 3301 - protein, 16 aa, Artificial Sequence
  Cyclic GFR-binding peptide
LEPLPVVYYDDSSNVI

SEQ ID NO: 3302 - protein, 14 aa, Artificial Sequence
  Cyclic GFR-binding peptide
  MOD_RES (1)..(1): Xaa is C or S
XVPQDLSPISILFI

SEQ ID NO: 3303 - protein, 14 aa, Artificial Sequence
  Cyclic GFR-binding peptide
  MOD_RES (1)..(1): Xaa is C or S
XVPQDLSAISILYL

SEQ ID NO: 3304 - protein, 19 aa, Artificial Sequence
  Cyclic GFR-binding peptide
  MOD_RES (5)..(6): Xaa is C or S
TPPTXXVPTRLEPLPIVYY

SEQ ID NO: 3305 - protein, 19 aa, Artificial Sequence
  Cyclic GFR-binding peptide
PQALSPISILFIVGRKPKV

SEQ ID NO: 3306 - protein, 18 aa, Artificial Sequence
  Cyclic GFR-binding peptide
  MOD_RES (4)..(5): Xaa is C or S
PKPXXAPTKLSAISVLYL

SEQ ID NO: 3307 - protein, 18 aa, Artificial Sequence
  Cyclic GFR-binding peptide
TELNAISMLYFDEYDKVV

SEQ ID NO: 3308 - protein, 17 aa, Artificial Sequence
  Cyclic GFR-binding peptide
ALNAISILYFVGRKPKV

SEQ ID NO: 3309 - protein, 14 aa, Artificial Sequence
  Cyclic GFR-binding peptide
  MOD_RES (1)..(1): Xaa is C or S
XVSQDLNAISILYF

SEQ ID NO: 3310 - protein, 17 aa, Artificial Sequence
  Cyclic GFR-binding peptide
ELEPLTMLYYDEYDKVV

SEQ ID NO: 3311 - protein, 17 aa, Artificial Sequence
  Cyclic GFR-binding peptide
  MOD_RES (3)..(4): Xaa is C or S
PTXXVPTRLEPLTILYY

SEQ ID NO: 3312 - protein, 16 aa, Artificial Sequence
  Cyclic GFR-binding peptide
LEPLTILYYDSANNVV

SEQ ID NO: 3313 - protein, 14 aa, Artificial Sequence
  Cyclic GFR-binding peptide
  MOD_RES (1)..(1): Xaa is C or S
XVPQDLNAISILYF

SEQ ID NO: 3314 - protein, 13 aa, Artificial Sequence
  Cyclic GFR-binding peptide
VPQDLNAISILYF

SEQ ID NO: 3315 - protein, 15 aa, Artificial Sequence
  Cyclic GFR-binding peptide
  MOD_RES (1)..(2): Xaa is C or S
XXAPTKLSPISVLFI

SEQ ID NO: 3316 - protein, 18 aa, Artificial Sequence
  Cyclic GFR-binding peptide
  MOD_RES (4)..(5): Xaa is C or S
PPTXXVPTRLEPLPIVYY

SEQ ID NO: 3317 - protein, 15 aa, Artificial Sequence
  Cyclic GFR-binding peptide
  MOD_RES (1)..(2): Xaa is C or S
XXAPTKLSAISVLYL

SEQ ID NO: 3318 - protein, 19 aa, Artificial Sequence
  Cyclic GFR-binding peptide
PTRLNAISILYFDSANNVV

SEQ ID NO: 3319 - protein, 19 aa, Artificial Sequence
  Cyclic GFR-binding peptide
PTRLEPLPIVYYDSANNVV

SEQ ID NO: 3320 - protein, 18 aa, Artificial Sequence
  Cyclic GFR-binding peptide
  MOD_RES (4)..(5): Xaa is C or S
PKPXXAPTKLSPISVLFI

SEQ ID NO: 3321 - protein, 18 aa, Artificial Sequence
  Cyclic GFR-binding peptide
  MOD_RES (4)..(5): Xaa is C or S
PKPXXAPTQLSAISVLYL

SEQ ID NO: 3322 - protein, 18 aa, Artificial Sequence
  Cyclic GFR-binding peptide
  MOD_RES (4)..(5): Xaa is C or S
PKPXXAPTQLSPISVLFI

SEQ ID NO: 3323 - protein, 15 aa, Artificial Sequence
  Cyclic GFR-binding peptide
  MOD_RES (1)..(2): Xaa is C or S
XXAPTQLSAISVLYL

SEQ ID NO: 3324 - protein, 15 aa, Artificial Sequence
  Cyclic GFR-binding peptide
  MOD_RES (1)..(2): Xaa is C or S
XXAPTQLSPISVLFI

SEQ ID NO: 3325 - protein, 15 aa, Artificial Sequence
  Cyclic GFR-binding peptide
EPLTMLYYDENEKVV

SEQ ID NO: 3326 - protein, 18 aa, Artificial Sequence
  Cyclic GFR-binding peptide
TRLSAISILYLDSANNVV

SEQ ID NO: 3327 - protein, 20 aa, Artificial Sequence
  Cyclic GFR-binding peptide
  MOD_RES (6)..(7): Xaa is C or S
ASAAPXXVPQALNAISILYF

SEQ ID NO: 3328 - protein, 19 aa, Artificial Sequence
  Cyclic GFR-binding peptide
  MOD_RES (6)..(6): Xaa is C or S
VTKPTXAPTKLSPISVLFI

SEQ ID NO: 3329 - protein, 19 aa, Artificial Sequence
  Cyclic GFR-binding peptide
  MOD_RES (6)..(6): Xaa is C or S
VTKPTXAPTKLSAISVLYL

SEQ ID NO: 3330 - protein, 15 aa, Artificial Sequence
  Cyclic GFR-binding peptide
EPLPIVYYDSANNVV

SEQ ID NO: 3331 - protein, 20 aa, Artificial Sequence
  Cyclic GFR-binding peptide
  MOD_RES (6)..(7): Xaa is C or S
ASAAPXXVPQALSAISILYL

SEQ ID NO: 3332 - protein, 18 aa, Artificial Sequence
  Cyclic GFR-binding peptide
TQLEPLTVLYYDDSSNVI

SEQ ID NO: 3333 - protein, 18 aa, Artificial Sequence
  Cyclic GFR-binding peptide
  MOD_RES (4)..(5): Xaa is C or S
ASPXXVSQDLNAISILYF

SEQ ID NO: 3334 - protein, 16 aa, Artificial Sequence
  Cyclic GFR-binding peptide
  MOD_RES (2)..(3): Xaa is C or S
TXXVPTRLSAISILYL

SEQ ID NO: 3335 - protein, 18 aa, Artificial Sequence
  Cyclic GFR-binding peptide
  MOD_RES (5)..(5): Xaa is C or S
TKPTXAPTKLSPISVLFI

SEQ ID NO: 3336 - protein, 19 aa, Artificial Sequence
  Cyclic GFR-binding peptide
  MOD_RES (5)..(6): Xaa is C or S
IPKAXXVPTELEPLPMVYY

SEQ ID NO: 3337 - protein, 19 aa, Artificial Sequence
  Cyclic GFR-binding peptide
PTELSPISMLFIDENEKVV

SEQ ID NO: 3338 - protein, 18 aa, Artificial Sequence
  Cyclic GFR-binding peptide
TKLEPLTVLYYDDSSNVI

SEQ ID NO: 3339 - protein, 13 aa, Artificial Sequence
  Cyclic GFR-binding peptide
VPTRLEPLPIVYY

SEQ ID NO: 3340 - protein, 15 aa, Artificial Sequence
  Cyclic GFR-binding peptide
NAISILYFVGRTPKV

SEQ ID NO: 3341 - protein, 15 aa, Artificial Sequence
  Cyclic GFR-binding peptide
SAISVLYLDDSSNVI

SEQ ID NO: 3342 - protein, 17 aa, Artificial Sequence
  Cyclic GFR-binding peptide
DLSAISILYLVGRTPKV

SEQ ID NO: 3343 - protein, 20 aa, Artificial Sequence
  Cyclic GFR-binding peptide
  MOD_RES (6)..(7): Xaa is C or S
KIPKAXXVPTELSPISMLFI

SEQ ID NO: 3344 - protein, 27 aa, Artificial Sequence
  Cyclic GFR-binding peptide
  MOD_RES (6)..(7): Xaa is C or S
ASAAPXXVPQALNAISILYFVGRKPKV

SEQ ID NO: 3345 - protein, 16 aa, Artificial Sequence
  Cyclic GFR-binding peptide
LEPLTILYYVGRKPKV

SEQ ID NO: 3346 - protein, 15 aa, Artificial Sequence
  Cyclic GFR-binding peptide
  MOD_RES (2)..(2): Xaa is C or S
TXAPTKLEPLTVLYY

SEQ ID NO: 3347 - protein, 17 aa, Artificial Sequence
  Cyclic GFR-binding peptide
DLSPISILFIVGRTPKV

SEQ ID NO: 3348 - protein, 19 aa, Artificial Sequence
  Cyclic GFR-binding peptide
  MOD_RES (5)..(6): Xaa is C or S
SASPXXVSQDLEPLPIVYY

SEQ ID NO: 3349 - protein, 18 aa, Artificial Sequence
  Cyclic GFR-binding peptide
TELEPLPMVYYDEYDKVV

SEQ ID NO: 3350 - protein, 27 aa, Artificial Sequence
  Cyclic GFR-binding peptide
  MOD_RES (6)..(7): Xaa is C or S
TVPKPXXAPTQLEPLTVLYYDDSSNVI

SEQ ID NO: 3351 - protein, 18 aa, Artificial Sequence
  Cyclic GFR-binding peptide
  MOD_RES (5)..(5): Xaa is C or S
TKPTXAPTKLSAISVLYL

SEQ ID NO: 3352 - protein, 18 aa, Artificial Sequence
  Cyclic GFR-binding peptide
  MOD_RES (4)..(5): Xaa is C or S
ASPXXVSQDLSPISILFI

SEQ ID NO: 3353 - protein, 17 aa, Artificial Sequence
  Cyclic GFR-binding peptide
  MOD_RES (3)..(4): Xaa is C or S
KPXXAPTQLSPISVLFI

SEQ ID NO: 3354 - protein, 20 aa, Artificial Sequence
  Cyclic GFR-binding peptide
  MOD_RES (6)..(7): Xaa is C or S
YVPKPXXAPTKLEPLPVVYY

SEQ ID NO: 3355 - protein, 18 aa, Artificial Sequence
  Cyclic GFR-binding peptide
  MOD_RES (4)..(5): Xaa is C or S
ASPXXVSQDLSAISILYL

SEQ ID NO: 3356 - protein, 17 aa, Artificial Sequence
  Cyclic GFR-binding peptide
  MOD_RES (3)..(4): Xaa is C or S
KPXXAPTQLSAISVLYL

SEQ ID NO: 3357 - protein, 27 aa, Artificial Sequence
  Cyclic GFR-binding peptide
  MOD_RES (6)..(7): Xaa is C or S
ASASPXXVSQDLNAISILYFIGKTPKI

SEQ ID NO: 3358 - protein, 27 aa, Artificial Sequence
  Cyclic GFR-binding peptide
  MOD_RES (6)..(7): Xaa is C or S
KIPKAXXVPTELSPISMLFIDENEKVV

SEQ ID NO: 3359 - protein, 17 aa, Artificial Sequence
  Cyclic GFR-binding peptide
DLSAISILYLIGKTPKI

SEQ ID NO: 3360 - protein, 27 aa, Artificial Sequence
  Cyclic GFR-binding peptide
  MOD_RES (6)..(7): Xaa is C or S
STPPTXXVPTRLNAISILYFDSANNVV

SEQ ID NO: 3361 - protein, 19 aa, Artificial Sequence
  Cyclic GFR-binding peptide
PTELNAISMLYFDENEKVV

SEQ ID NO: 3362 - protein, 27 aa, Artificial Sequence
  Cyclic GFR-binding peptide
  MOD_RES (6)..(7): Xaa is C or S
KIPKAXXVPTELNAISMLYFDENEKVV

SEQ ID NO: 3363 - protein, 14 aa, Artificial Sequence
  Cyclic GFR-binding peptide
  MOD_RES (1)..(1): Xaa is C or S
XVPQALNAISILYF

SEQ ID NO: 3364 - protein, 27 aa, Artificial Sequence
  Cyclic GFR-binding peptide
  MOD_RES (6)..(7): Xaa is C or S
ASASPXXVPQDLNAISILYFVGRTPKV

SEQ ID NO: 3365 - protein, 20 aa, Artificial Sequence
  Cyclic GFR-binding peptide
  MOD_RES (6)..(7): Xaa is C or S
STPPTXXVPTRLEPLTILYY

SEQ ID NO: 3366 - protein, 17 aa, Artificial Sequence
  Cyclic GFR-binding peptide
ELSPISMLFIDENEKVV

SEQ ID NO: 3367 - protein, 17 aa, Artificial Sequence
  Cyclic GFR-binding peptide
DLNAISILYFIGKTPKI

SEQ ID NO: 3368 - protein, 19 aa, Artificial Sequence
  Cyclic GFR-binding peptide
SQDLEPLPIVYYIGKTPKI

SEQ ID NO: 3369 - protein, 18 aa, Artificial Sequence
  Cyclic GFR-binding peptide
  MOD_RES (4)..(5): Xaa is C or S
PKPXXAPTKLEPLTVLYY

SEQ ID NO: 3370 - protein, 18 aa, Artificial Sequence
  Cyclic GFR-binding peptide
  MOD_RES (4)..(5): Xaa is C or S
PKAXXVPTELEPLPMVYY

SEQ ID NO: 3371 - protein, 19 aa, Artificial Sequence
  Cyclic GFR-binding peptide
  MOD_RES (5)..(6): Xaa is C or S
SAAPXXVPQALNAISILYF

SEQ ID NO: 3372 - protein, 18 aa, Artificial Sequence
  Cyclic GFR-binding peptide
TELEPLPMVYYDENEKVV

SEQ ID NO: 3373 - protein, 18 aa, Artificial Sequence
  Cyclic GFR-binding peptide
  MOD_RES (4)..(5): Xaa is C or S
ASPXXVSQDLEPLPIVYY

SEQ ID NO: 3374 - protein, 17 aa, Artificial Sequence
  Cyclic GFR-binding peptide
ELEPLTMLYYDENEKVV

SEQ ID NO: 3375 - protein, 27 aa, Artificial Sequence
  Cyclic GFR-binding peptide
  MOD_RES (6)..(7): Xaa is C or S
STPPTXXVPTRLSAISILYLDSANNVV

SEQ ID NO: 3376 - protein, 19 aa, Artificial Sequence
  Cyclic GFR-binding peptide
PQALSAISILYLVGRKPKV

SEQ ID NO: 3377 - protein, 20 aa, Artificial Sequence
  Cyclic GFR-binding peptide
  MOD_RES (6)..(7): Xaa is C or S
ASAAPXXVPQALSPISILFI

SEQ ID NO: 3378 - protein, 15 aa, Artificial Sequence
  Cyclic GFR-binding peptide
SPISVLFIDDSSNVI

SEQ ID NO: 3379 - protein, 27 aa, Artificial Sequence
  Cyclic GFR-binding peptide
  MOD_RES (6)..(7): Xaa is C or S
ASASPXXVPQDLSAISILYLVGRTPKV

SEQ ID NO: 3380 - protein, 16 aa, Artificial Sequence
  Cyclic GFR-binding peptide
LNAISMLYFDEYDKVV

SEQ ID NO: 3381 - protein, 13 aa, Artificial Sequence
  Cyclic GFR-binding peptide
VPQALEPLTILYY

SEQ ID NO: 3382 - protein, 17 aa, Artificial Sequence
  Cyclic GFR-binding peptide
  MOD_RES (3)..(4): Xaa is C or S
PTXXVPTRLEPLPIVYY

SEQ ID NO: 3383 - protein, 16 aa, Artificial Sequence
  Cyclic GFR-binding peptide
LSAISILYLVGRKPKV

SEQ ID NO: 3384 - protein, 15 aa, Artificial Sequence
  Cyclic GFR-binding peptide
EPLPIVYYVGRTPKV

SEQ ID NO: 3385 - protein, 13 aa, Artificial Sequence
  Cyclic GFR-binding peptide
APTQLEPLTVLYY

SEQ ID NO: 3386 - protein, 16 aa, Artificial Sequence
  Cyclic GFR-binding peptide
LNAISILYFVGRTPKV

SEQ ID NO: 3387 - protein, 15 aa, Artificial Sequence
  Cyclic GFR-binding peptide
EPLPMVYYDEYDKVV

SEQ ID NO: 3388 - protein, 18 aa, Artificial Sequence
  Cyclic GFR-binding peptide
TELSPISMLFIDEYDKVV

SEQ ID NO: 3389 - protein, 17 aa, Artificial Sequence
  Cyclic GFR-binding peptide
ELNAISMLYFDEYDKVV

SEQ ID NO: 3390 - protein, 18 aa, Artificial Sequence
  Cyclic GFR-binding peptide
  MOD_RES (4)..(5): Xaa is C or S
PPTXXVPTRLEPLTILYY

SEQ ID NO: 3391 - protein, 18 aa, Artificial Sequence
  Cyclic GFR-binding peptide
  MOD_RES (4)..(5): Xaa is C or S
PKPXXAPTKLEPLPVVYY

SEQ ID NO: 3392 - protein, 18 aa, Artificial Sequence
  Cyclic GFR-binding peptide
TKLSAISVLYLDDSSNVI

SEQ ID NO: 3393 - protein, 14 aa, Artificial Sequence
  Cyclic GFR-binding peptide
  MOD_RES (1)..(1): Xaa is C or S
XAPTKLSAISVLYL

SEQ ID NO: 3394 - protein, 19 aa, Artificial Sequence
  Cyclic GFR-binding peptide
  MOD_RES (5)..(6): Xaa is C or S
VPKPXXAPTKLSAISVLYL

SEQ ID NO: 3395 - protein, 19 aa, Artificial Sequence
  Cyclic GFR-binding peptide
  MOD_RES (5)..(6): Xaa is C or S
IPKAXXVPTELNAISMLYF

SEQ ID NO: 3396 - protein, 17 aa, Artificial Sequence
  Cyclic GFR-binding peptide
  MOD_RES (3)..(4): Xaa is C or S
SPXXVPQDLSAISILYL

SEQ ID NO: 3397 - protein, 16 aa, Artificial Sequence
  Cyclic GFR-binding peptide
LEPLPIVYYDSANNVV

SEQ ID NO: 3398 - protein, 27 aa, Artificial Sequence
  Cyclic GFR-binding peptide
  MOD_RES (6)..(7): Xaa is C or S
TVPKPXXAPTQLSAISVLYLDDSSNVI

SEQ ID NO: 3399 - protein, 19 aa, Artificial Sequence
  Cyclic GFR-binding peptide
  MOD_RES (5)..(6): Xaa is C or S
SASPXXVPQDLNAISILYF

SEQ ID NO: 3400 - protein, 20 aa, Artificial Sequence
  Cyclic GFR-binding peptide
  MOD_RES (6)..(7): Xaa is C or S
SIPKAXXVPTELNAISMLYF

SEQ ID NO: 3401 - protein, 18 aa, Artificial Sequence
  Cyclic GFR-binding peptide
TQLSAISVLYLDDSSNVI

SEQ ID NO: 3402 - protein, 13 aa, Artificial Sequence
  Cyclic GFR-binding peptide
VPTRLEPLTILYY

SEQ ID NO: 3403 - protein, 20 aa, Artificial Sequence
  Cyclic GFR-binding peptide
  MOD_RES (6)..(7): Xaa is C or S
ASASPXXVPQDLSPISILFI

SEQ ID NO: 3404 - protein, 16 aa, Artificial Sequence
  Cyclic GFR-binding peptide
  MOD_RES (2)..(3): Xaa is C or S
AXXVPTELNAISMLYF

SEQ ID NO: 3405 - protein, 17 aa, Artificial Sequence
  Cyclic GFR-binding peptide
  MOD_RES (3)..(4): Xaa is C or S
KPXXAPTKLSPISVLFI

SEQ ID NO: 3406 - protein, 15 aa, Artificial Sequence
  Cyclic GFR-binding peptide
  MOD_RES (1)..(2): Xaa is C or S
XXVPQDLSAISILYL

SEQ ID NO: 3407 - protein, 27 aa, Artificial Sequence
  Cyclic GFR-binding peptide
  MOD_RES (6)..(7): Xaa is C or S
YVPKPXXAPTKLSAISVLYLDDSSNVI

SEQ ID NO: 3408 - protein, 19 aa, Artificial Sequence
  Cyclic GFR-binding peptide
PTELEPLPMVYYDEYDKVV

SEQ ID NO: 3409 - protein, 15 aa, Artificial Sequence
  Cyclic GFR-binding peptide
EPLTVLYYDDSSNVI

SEQ ID NO: 3410 - protein, 27 aa, Artificial Sequence
  Cyclic GFR-binding peptide
  MOD_RES (6)..(7): Xaa is C or S
ASASPXXVSQDLEPLPIVYYIGKTPKI

SEQ ID NO: 3411 - protein, 16 aa, Artificial Sequence
  Cyclic GFR-binding peptide
  MOD_RES (2)..(3): Xaa is C or S
PXXVPQALEPLTILYY

SEQ ID NO: 3412 - protein, 19 aa, Artificial Sequence
  Cyclic GFR-binding peptide
PTRLSAISILYLDSANNVV

SEQ ID NO: 3413 - protein, 19 aa, Artificial Sequence
  Cyclic GFR-binding peptide
PTQLSAISVLYLDDSSNVI

SEQ ID NO: 3414 - protein, 18 aa, Artificial Sequence
  Cyclic GFR-binding peptide
QDLNAISILYFVGRTPKV

SEQ ID NO: 3415 - protein, 17 aa, Artificial Sequence
  Cyclic GFR-binding peptide
QLSPISVLFIDDSSNVI

SEQ ID NO: 3416 - protein, 17 aa, Artificial Sequence
  Cyclic GFR-binding peptide
  MOD_RES (3)..(4): Xaa is C or S
APXXVPQALSAISILYL

SEQ ID NO: 3417 - protein, 17 aa, Artificial Sequence
  Cyclic GFR-binding peptide
KLSPISVLFIDDSSNVI

SEQ ID NO: 3418 - protein, 19 aa, Artificial Sequence
  Cyclic GFR-binding peptide
PQDLNAISILYFVGRTPKV

SEQ ID NO: 3419 - protein, 16 aa, Artificial Sequence
  Cyclic GFR-binding peptide
  MOD_RES (3)..(3): Xaa is C or S
PTXAPTKLSAISVLYL

SEQ ID NO: 3420 - protein, 14 aa, Artificial Sequence
  Cyclic GFR-binding peptide
  MOD_RES (1)..(1): Xaa is C or S
XVSQDLSAISILYL

SEQ ID NO: 3421 - protein, 27 aa, Artificial Sequence
  Cyclic GFR-binding peptide
  MOD_RES (6)..(7): Xaa is C or S
SIPKAXXVPTELSPISMLFIDEYDKVV

SEQ ID NO: 3422 - protein, 16 aa, Artificial Sequence
  Cyclic GFR-binding peptide
LSAISILYLVGRTPKV

SEQ ID NO: 3423 - protein, 18 aa, Artificial Sequence
  Cyclic GFR-binding peptide
  MOD_RES (4)..(5): Xaa is C or S
PKAXXVPTELEPLTMLYY

SEQ ID NO: 3424 - protein, 17 aa, Artificial Sequence
  Cyclic GFR-binding peptide
  MOD_RES (3)..(4): Xaa is C or S
KAXXVPTELSPISMLFI

SEQ ID NO: 3425 - protein, 17 aa, Artificial Sequence
  Cyclic GFR-binding peptide
  MOD_RES (3)..(4): Xaa is C or S
APXXVPQALSPISILFI

SEQ ID NO: 3426 - protein, 16 aa, Artificial Sequence
  Cyclic GFR-binding peptide
  MOD_RES (2)..(3): Xaa is C or S
PXXVPQDLSAISILYL

SEQ ID NO: 3427 - protein, 16 aa, Artificial Sequence
  Cyclic GFR-binding peptide
LEPLTMLYYDENEKVV

SEQ ID NO: 3428 - protein, 20 aa, Artificial Sequence
  Cyclic GFR-binding peptide
  MOD_RES (6)..(7): Xaa is C or S
ASASPXXVSQDLSAISILYL

SEQ ID NO: 3429 - protein, 18 aa, Artificial Sequence
  Cyclic GFR-binding peptide
  MOD_RES (4)..(5): Xaa is C or S
AAPXXVPQALNAISILYF

SEQ ID NO: 3430 - protein, 17 aa, Artificial Sequence
  Cyclic GFR-binding peptide
ALSAISILYLVGRKPKV

SEQ ID NO: 3431 - protein, 20 aa, Artificial Sequence
  Cyclic GFR-binding peptide
  MOD_RES (6)..(7): Xaa is C or S
ASASPXXVPQDLEPLPIVYY

SEQ ID NO: 3432 - protein, 17 aa, Artificial Sequence
  Cyclic GFR-binding peptide
  MOD_RES (3)..(4): Xaa is C or S
KPXXAPTKLEPLPVVYY

SEQ ID NO: 3433 - protein, 15 aa, Artificial Sequence
  Cyclic GFR-binding peptide
  MOD_RES (1)..(2): Xaa is C or S
XXVSQDLNAISILYF

SEQ ID NO: 3434 - protein, 19 aa, Artificial Sequence
  Cyclic GFR-binding peptide
PQALNAISILYFVGRKPKV

SEQ ID NO: 3435 - protein, 15 aa, Artificial Sequence
  Cyclic GFR-binding peptide
SAISILYLVGRTPKV

SEQ ID NO: 3436 - protein, 14 aa, Artificial Sequence
  Cyclic GFR-binding peptide
  MOD_RES (1)..(1): Xaa is C or S
XVPTRLNAISILYF

SEQ ID NO: 3437 - protein, 14 aa, Artificial Sequence
  Cyclic GFR-binding peptide
  MOD_RES (1)..(1): Xaa is C or S
XVPTRLSAISILYL

SEQ ID NO: 3438 - protein, 19 aa, Artificial Sequence
  Cyclic GFR-binding peptide
PTKLSPISVLFIDDSSNVI

SEQ ID NO: 3439 - protein, 16 aa, Artificial Sequence
  Cyclic GFR-binding peptide
  MOD_RES (2)..(3): Xaa is C or S
PXXAPTKLSAISVLYL

SEQ ID NO: 3440 - protein, 15 aa, Artificial Sequence
  Cyclic GFR-binding peptide
NAISMLYFDEYDKVV

SEQ ID NO: 3441 - protein, 19 aa, Artificial Sequence
  Cyclic GFR-binding peptide
  MOD_RES (5)..(6): Xaa is C or S
TPPTXXVPTRLEPLTILYY

SEQ ID NO: 3442 - protein, 20 aa, Artificial Sequence
  Cyclic GFR-binding peptide
  MOD_RES (6)..(7): Xaa is C or S
STPPTXXVPTRLEPLPIVYY

SEQ ID NO: 3443 - protein, 27 aa, Artificial Sequence
  Cyclic GFR-binding peptide
  MOD_RES (7)..(7): Xaa is C or S
HVTKPTXAPTKLSAISVLYLDDSSNVI

SEQ ID NO: 3444 - protein, 20 aa, Artificial Sequence
  Cyclic GFR-binding peptide
  MOD_RES (6)..(7): Xaa is C or S
ASASPXXVSQDLNAISILYF

SEQ ID NO: 3445 - protein, 13 aa, Artificial Sequence
  Cyclic GFR-binding peptide
VSQDLNAISILYF

SEQ ID NO: 3446 - protein, 14 aa, Artificial Sequence
  Cyclic GFR-binding peptide
  MOD_RES (1)..(1): Xaa is C or S
XAPTQLSAISVLYL

SEQ ID NO: 3447 - protein, 19 aa, Artificial Sequence
  Cyclic GFR-binding peptide
PTQLSPISVLFIDDSSNVI

SEQ ID NO: 3448 - protein, 18 aa, Artificial Sequence
  Cyclic GFR-binding peptide
  MOD_RES (4)..(5): Xaa is C or S
PKAXXVPTELSPISMLFI

SEQ ID NO: 3449 - protein, 18 aa, Artificial Sequence
  Cyclic GFR-binding peptide
  MOD_RES (4)..(5): Xaa is C or S
ASPXXVPQDLNAISILYF

SEQ ID NO: 3450 - protein, 15 aa, Artificial Sequence
  Cyclic GFR-binding peptide
SPISMLFIDENEKVV

SEQ ID NO: 3451 - protein, 19 aa, Artificial Sequence
  Cyclic GFR-binding peptide
PTKLSAISVLYLDDSSNVI

SEQ ID NO: 3452 - protein, 16 aa, Artificial Sequence
  Cyclic GFR-binding peptide
  MOD_RES (2)..(3): Xaa is C or S
PXXVPQDLNAISILYF

SEQ ID NO: 3453 - protein, 17 aa, Artificial Sequence
  Cyclic GFR-binding peptide
  MOD_RES (3)..(4): Xaa is C or S
KAXXVPTELEPLPMVYY

SEQ ID NO: 3454 - protein, 18 aa, Artificial Sequence
  Cyclic GFR-binding peptide
  MOD_RES (4)..(5): Xaa is C or S
PPTXXVPTRLNAISILYF

SEQ ID NO: 3455 - protein, 19 aa, Artificial Sequence
  Cyclic GFR-binding peptide
SQDLSAISILYLIGKTPKI

SEQ ID NO: 3456 - protein, 15 aa, Artificial Sequence
  Cyclic GFR-binding peptide
  MOD_RES (1)..(2): Xaa is C or S
XXAPTQLEPLPVVYY

SEQ ID NO: 3457 - protein, 27 aa, Artificial Sequence
  Cyclic GFR-binding peptide
  MOD_RES (6)..(7): Xaa is C or S
YVPKPXXAPTKLEPLPVVYYDDSSNVI

SEQ ID NO: 3458 - protein, 17 aa, Artificial Sequence
  Cyclic GFR-binding peptide
  MOD_RES (3)..(4): Xaa is C or S
KPXXAPTKLEPLTVLYY

SEQ ID NO: 3459 - protein, 27 aa, Artificial Sequence
  Cyclic GFR-binding peptide
  MOD_RES (6)..(7): Xaa is C or S
ASAAPXXVPQALEPLTILYYVGRKPKV

SEQ ID NO: 3460 - protein, 20 aa, Artificial Sequence
  Cyclic GFR-binding peptide
  MOD_RES (6)..(7): Xaa is C or S
ASAAPXXVPQALEPLTILYY

SEQ ID NO: 3461 - protein, 19 aa, Artificial Sequence
  Cyclic GFR-binding peptide
  MOD_RES (5)..(6): Xaa is C or S
SASPXXVSQDLSPISILFI

SEQ ID NO: 3462 - protein, 18 aa, Artificial Sequence
  Cyclic GFR-binding peptide
TELNAISMLYFDENEKVV

SEQ ID NO: 3463 - protein, 14 aa, Artificial Sequence
  Cyclic GFR-binding peptide
  MOD_RES (1)..(1): Xaa is C or S
XVPQDLEPLPIVYY

SEQ ID NO: 3464 - protein, 19 aa, Artificial Sequence
  Cyclic GFR-binding peptide
  MOD_RES (5)..(6): Xaa is C or S
SASPXXVSQDLNAISILYF

SEQ ID NO: 3465 - protein, 16 aa, Artificial Sequence
  Cyclic GFR-binding peptide
LSPISILFIVGRTPKV

SEQ ID NO: 3466 - protein, 27 aa, Artificial Sequence
  Cyclic GFR-binding peptide
  MOD_RES (6)..(7): Xaa is C or S
TVPKPXXAPTQLEPLPVVYYDDSSNVI

SEQ ID NO: 3467 - protein, 19 aa, Artificial Sequence
  Cyclic GFR-binding peptide
SQDLNAISILYFIGKTPKI

SEQ ID NO: 3468 - protein, 17 aa, Artificial Sequence
  Cyclic GFR-binding peptide
RLSAISILYLDSANNVV

SEQ ID NO: 3469 - protein, 18 aa, Artificial Sequence
  Cyclic GFR-binding peptide
  MOD_RES (4)..(5): Xaa is C or S
PKPXXAPTQLEPLTVLYY

SEQ ID NO: 3470 - protein, 15 aa, Artificial Sequence
  Cyclic GFR-binding peptide
  MOD_RES (1)..(2): Xaa is C or S
XXVPTELSPISMLFI

SEQ ID NO: 3471 - protein, 20 aa, Artificial Sequence
  Cyclic GFR-binding peptide
  MOD_RES (6)..(7): Xaa is C or S
TVPKPXXAPTQLEPLPVVYY

SEQ ID NO: 3472 - protein, 16 aa, Artificial Sequence
  Cyclic GFR-binding peptide
  MOD_RES (2)..(3): Xaa is C or S
PXXAPTQLEPLPVVYY

SEQ ID NO: 3473 - protein, 18 aa, Artificial Sequence
  Cyclic GFR-binding peptide
QALNAISILYFVGRKPKV

SEQ ID NO: 3474 - protein, 16 aa, Artificial Sequence
  Cyclic GFR-binding peptide
LNAISILYFIGKTPKI

SEQ ID NO: 3475 - protein, 20 aa, Artificial Sequence
  Cyclic GFR-binding peptide
  MOD_RES (6)..(7): Xaa is C or S
YVPKPXXAPTKLSAISVLYL

SEQ ID NO: 3476 - protein, 16 aa, Artificial Sequence
  Cyclic GFR-binding peptide
  MOD_RES (2)..(3): Xaa is C or S
PXXVPQALNAISILYF

SEQ ID NO: 3477 - protein, 18 aa, Artificial Sequence
  Cyclic GFR-binding peptide
QALSAISILYLVGRKPKV

SEQ ID NO: 3478 - protein, 16 aa, Artificial Sequence
  Cyclic GFR-binding peptide
LSPISVLFIDDSSNVI

SEQ ID NO: 3479 - protein, 19 aa, Artificial Sequence
  Cyclic GFR-binding peptide
PTELEPLPMVYYDENEKVV

SEQ ID NO: 3480 - protein, 15 aa, Artificial Sequence
  Cyclic GFR-binding peptide
SPISILFIVGRKPKV

SEQ ID NO: 3481 - protein, 17 aa, Artificial Sequence
  Cyclic GFR-binding peptide
  MOD_RES (3)..(4): Xaa is C or S
PTXXVPTRLSAISILYL

SEQ ID NO: 3482 - protein, 19 aa, Artificial Sequence
  Cyclic GFR-binding peptide
  MOD_RES (5)..(6): Xaa is C or S
TPPTXXVPTRLNAISILYF

SEQ ID NO: 3483 - protein, 15 aa, Artificial Sequence
  Cyclic GFR-binding peptide
  MOD_RES (1)..(2): Xaa is C or S
XXVSQDLSAISILYL

SEQ ID NO: 3484 - protein, 17 aa, Artificial Sequence
  Cyclic GFR-binding peptide
ALEPLTILYYVGRKPKV

SEQ ID NO: 3485 - protein, 19 aa, Artificial Sequence
  Cyclic GFR-binding peptide
PTKLEPLTVLYYDDSSNVI

SEQ ID NO: 3486 - protein, 18 aa, Artificial Sequence
  Cyclic GFR-binding peptide
  MOD_RES (4)..(5): Xaa is C or S
AAPXXVPQALEPLTILYY

SEQ ID NO: 3487 - protein, 19 aa, Artificial Sequence
  Cyclic GFR-binding peptide
PTQLEPLTVLYYDDSSNVI

SEQ ID NO: 3488 - protein, 19 aa, Artificial Sequence
  Cyclic GFR-binding peptide
  MOD_RES (5)..(6): Xaa is C or S
VPKPXXAPTQLEPLPVVYY

SEQ ID NO: 3489 - protein, 20 aa, Artificial Sequence
  Cyclic GFR-binding peptide
  MOD_RES (6)..(7): Xaa is C or S
STPPTXXVPTRLNAISILYF

SEQ ID NO: 3490 - protein, 27 aa, Artificial Sequence
  Cyclic GFR-binding peptide
  MOD_RES (6)..(7): Xaa is C or S
ASASPXXVPQDLSPISILFIVGRTPKV

SEQ ID NO: 3491 - protein, 15 aa, Artificial Sequence
  Cyclic GFR-binding peptide
  MOD_RES (1)..(2): Xaa is C or S
XXAPTQLEPLTVLYY

SEQ ID NO: 3492 - protein, 13 aa, Artificial Sequence
  Cyclic GFR-binding peptide
VPTRLNAISILYF

SEQ ID NO: 3493 - protein, 27 aa, Artificial Sequence
  Cyclic GFR-binding peptide
  MOD_RES (6)..(7): Xaa is C or S
KIPKAXXVPTELEPLPMVYYDENEKVV

SEQ ID NO: 3494 - protein, 17 aa, Artificial Sequence
  Cyclic GFR-binding peptide
  MOD_RES (3)..(4): Xaa is C or S
SPXXVPQDLSPISILFI

SEQ ID NO: 3495 - protein, 18 aa, Artificial Sequence
  Cyclic GFR-binding peptide
QDLEPLPIVYYIGKTPKI

SEQ ID NO: 3496 - protein, 19 aa, Artificial Sequence
  Cyclic GFR-binding peptide
  MOD_RES (5)..(6): Xaa is C or S
SAAPXXVPQALSAISILYL

SEQ ID NO: 3497 - protein, 15 aa, Artificial Sequence
  Cyclic GFR-binding peptide
  MOD_RES (1)..(2): Xaa is C or S
XXVPTELNAISMLYF

SEQ ID NO: 3498 - protein, 20 aa, Artificial Sequence
  Cyclic GFR-binding peptide
  MOD_RES (6)..(7): Xaa is C or S
ASASPXXVPQDLSAISILYL

SEQ ID NO: 3499 - protein, 16 aa, Artificial Sequence
  Cyclic GFR-binding peptide
  MOD_RES (2)..(3): Xaa is C or S
PXXVPQALSPISILFI

SEQ ID NO: 3500 - protein, 15 aa, Artificial Sequence
  Cyclic GFR-binding peptide
EPLTILYYVGRKPKV

SEQ ID NO: 3501 - protein, 18 aa, Artificial Sequence
  Cyclic GFR-binding peptide
  MOD_RES (4)..(5): Xaa is C or S
ASPXXVPQDLEPLPIVYY

SEQ ID NO: 3502 - protein, 15 aa, Artificial Sequence
  Cyclic GFR-binding peptide
  MOD_RES (2)..(2): Xaa is C or S
TXAPTKLSAISVLYL

SEQ ID NO: 3503 - protein, 15 aa, Artificial Sequence
  Cyclic GFR-binding peptide
  MOD_RES (1)..(2): Xaa is C or S
XXVPTRLSAISILYL

SEQ ID NO: 3504 - protein, 13 aa, Artificial Sequence
  Cyclic GFR-binding peptide
VPTELNAISMLYF

SEQ ID NO: 3505 - protein, 18 aa, Artificial Sequence
  Cyclic GFR-binding peptide
QDLSAISILYLVGRTPKV

SEQ ID NO: 3506 - protein, 19 aa, Artificial Sequence
  Cyclic GFR-binding peptide
PQDLEPLPIVYYVGRTPKV

SEQ ID NO: 3507 - protein, 17 aa, Artificial Sequence
  Cyclic GFR-binding peptide
RLEPLTILYYDSANNVV

SEQ ID NO: 3508 - protein, 15 aa, Artificial Sequence
  Cyclic GFR-binding peptide
SAISILYLVGRKPKV

SEQ ID NO: 3509 - protein, 15 aa, Artificial Sequence
  Cyclic GFR-binding peptide
  MOD_RES (1)..(2): Xaa is C or S
XXVPTRLNAISILYF

SEQ ID NO: 3510 - protein, 18 aa, Artificial Sequence
  Cyclic GFR-binding peptide
  MOD_RES (5)..(5): Xaa is C or S
TKPTXAPTKLEPLPVVYY

SEQ ID NO: 3511 - protein, 18 aa, Artificial Sequence
  Cyclic GFR-binding peptide
TRLEPLPIVYYDSANNVV

SEQ ID NO: 3512 - protein, 16 aa, Artificial Sequence
  Cyclic GFR-binding peptide
LEPLPMVYYDEYDKVV

SEQ ID NO: 3513 - protein, 15 aa, Artificial Sequence
  Cyclic GFR-binding peptide
  MOD_RES (1)..(2): Xaa is C or S
XXVPQALEPLTILYY

SEQ ID NO: 3514 - protein, 15 aa, Artificial Sequence
  Cyclic GFR-binding peptide
EPLPVVYYDDSSNVI

SEQ ID NO: 3515 - protein, 13 aa, Artificial Sequence
  Cyclic GFR-binding peptide
APTKLEPLTVLYY

SEQ ID NO: 3516 - protein, 20 aa, Artificial Sequence
  Cyclic GFR-binding peptide
  MOD_RES (6)..(7): Xaa is C or S
KIPKAXXVPTELEPLPMVYY

SEQ ID NO: 3517 - protein, 14 aa, Artificial Sequence
  Cyclic GFR-binding peptide
  MOD_RES (1)..(1): Xaa is C or S
XVPQALEPLTILYY

SEQ ID NO: 3518 - protein, 16 aa, Artificial Sequence
  Cyclic GFR-binding peptide
  MOD_RES (2)..(3): Xaa is C or S
PXXVSQDLNAISILYF

SEQ ID NO: 3519 - protein, 16 aa, Artificial Sequence
  Cyclic GFR-binding peptide
LNAISILYFVGRKPKV

SEQ ID NO: 3520 - protein, 17 aa, Artificial Sequence
  Cyclic GFR-binding peptide
  MOD_RES (3)..(4): Xaa is C or S
SPXXVSQDLSPISILFI

SEQ ID NO: 3521 - protein, 27 aa, Artificial Sequence
  Cyclic GFR-binding peptide
  MOD_RES (7)..(7): Xaa is C or S
HVTKPTXAPTKLEPLTVLYYDDSSNVI

SEQ ID NO: 3522 - protein, 14 aa, Artificial Sequence
  Cyclic GFR-binding peptide
  MOD_RES (1)..(1): Xaa is C or S
XVPTELNAISMLYF

SEQ ID NO: 3523 - protein, 17 aa, Artificial Sequence
  Cyclic GFR-binding peptide
  MOD_RES (3)..(4): Xaa is C or S
SPXXVSQDLSAISILYL

SEQ ID NO: 3524 - protein, 20 aa, Artificial Sequence
  Cyclic GFR-binding peptide
  MOD_RES (6)..(7): Xaa is C or S
ASASPXXVPQDLNAISILYF

SEQ ID NO: 3525 - protein, 27 aa, Artificial Sequence
  Cyclic GFR-binding peptide
  MOD_RES (6)..(7): Xaa is C or S
STPPTXXVPTRLEPLTILYYDSANNVV

SEQ ID NO: 3526 - protein, 16 aa, Artificial Sequence
  Cyclic GFR-binding peptide
LNAISILYFDSANNVV

SEQ ID NO: 3527 - protein, 16 aa, Artificial Sequence
  Cyclic GFR-binding peptide
LEPLPIVYYIGKTPKI

SEQ ID NO: 3528 - protein, 15 aa, Artificial Sequence
  Cyclic GFR-binding peptide
NAISMLYFDENEKVV

SEQ ID NO: 3529 - protein, 15 aa, Artificial Sequence
  Cyclic GFR-binding peptide
  MOD_RES (1)..(2): Xaa is C or S
XXAPTKLEPLTVLYY

SEQ ID NO: 3530 - protein, 19 aa, Artificial Sequence
  Cyclic GFR-binding peptide
PTRLEPLTILYYDSANNVV

SEQ ID NO: 3531 - protein, 18 aa, Artificial Sequence
  Cyclic GFR-binding peptide
QDLNAISILYFIGKTPKI

SEQ ID NO: 3532 - protein, 20 aa, Artificial Sequence
  Cyclic GFR-binding peptide
  MOD_RES (7)..(7): Xaa is C or S
HVTKPTXAPTKLEPLTVLYY

SEQ ID NO: 3533 - protein, 18 aa, Artificial Sequence
  Cyclic GFR-binding peptide
TKLEPLPVVYYDDSSNVI

SEQ ID NO: 3534 - protein, 15 aa, Artificial Sequence
  Cyclic GFR-binding peptide
SPISILFIIGKTPKI

SEQ ID NO: 3535 - protein, 14 aa, Artificial Sequence
  Cyclic GFR-binding peptide
  MOD_RES (1)..(1): Xaa is C or S
XAPTKLEPLPVVYY

SEQ ID NO: 3536 - protein, 18 aa, Artificial Sequence
  Cyclic GFR-binding peptide
TELEPLTMLYYDEYDKVV

SEQ ID NO: 3537 - protein, 16 aa, Artificial Sequence
  Cyclic GFR-binding peptide
  MOD_RES (2)..(3): Xaa is C or S
TXXVPTRLEPLPIVYY

SEQ ID NO: 3538 - protein, 18 aa, Artificial Sequence
  Cyclic GFR-binding peptide
  MOD_RES (4)..(5): Xaa is C or S
PKPXXAPTQLEPLPVVYY

SEQ ID NO: 3539 - protein, 15 aa, Artificial Sequence
  Cyclic GFR-binding peptide
EPLTILYYDSANNVV

SEQ ID NO: 3540 - protein, 16 aa, Artificial Sequence
  Cyclic GFR-binding peptide
LEPLTVLYYDDSSNVI

SEQ ID NO: 3541 - protein, 16 aa, Artificial Sequence
  Cyclic GFR-binding peptide
  MOD_RES (2)..(3): Xaa is C or S
PXXAPTQLEPLTVLYY

SEQ ID NO: 3542 - protein, 17 aa, Artificial Sequence
  Cyclic GFR-binding peptide
KLEPLTVLYYDDSSNVI

SEQ ID NO: 3543 - protein, 17 aa, Artificial Sequence
  Cyclic GFR-binding peptide
  MOD_RES (3)..(4): Xaa is C or S
PTXXVPTRLNAISILYF

SEQ ID NO: 3544 - protein, 16 aa, Artificial Sequence
  Cyclic GFR-binding peptide
  MOD_RES (2)..(3): Xaa is C or S
PXXVSQDLSAISILYL

SEQ ID NO: 3545 - protein, 18 aa, Artificial Sequence
  Cyclic GFR-binding peptide
TQLEPLPVVYYDDSSNVI

SEQ ID NO: 3546 - protein, 17 aa, Artificial Sequence
  Cyclic GFR-binding peptide
ELEPLPMVYYDEYDKVV

SEQ ID NO: 3547 - protein, 19 aa, Artificial Sequence
  Cyclic GFR-binding peptide
  MOD_RES (6)..(6): Xaa is C or S
VTKPTXAPTKLEPLPVVYY

SEQ ID NO: 3548 - protein, 13 aa, Artificial Sequence
  Cyclic GFR-binding peptide
APTQLEPLPVVYY

SEQ ID NO: 3549 - protein, 16 aa, Artificial Sequence
  Cyclic GFR-binding peptide
  MOD_RES (2)..(3): Xaa is C or S
PXXVSQDLSPISILFI

SEQ ID NO: 3550 - protein, 16 aa, Artificial Sequence
  Cyclic GFR-binding peptide
  MOD_RES (2)..(3): Xaa is C or S
AXXVPTELEPLPMVYY

SEQ ID NO: 3551 - protein, 17 aa, Artificial Sequence
  Cyclic GFR-binding peptide
QLEPLTVLYYDDSSNVI

SEQ ID NO: 3552 - protein, 27 aa, Artificial Sequence
  Cyclic GFR-binding peptide
  MOD_RES (6)..(7): Xaa is C or S
SIPKAXXVPTELEPLTMLYYDEYDKVV

SEQ ID NO: 3553 - protein, 18 aa, Artificial Sequence
  Cyclic GFR-binding peptide
  MOD_RES (4)..(5): Xaa is C or S
PPTXXVPTRLSAISILYL

SEQ ID NO: 3554 - protein, 18 aa, Artificial Sequence
  Cyclic GFR-binding peptide
QDLSPISILFIVGRTPKV

SEQ ID NO: 3555 - protein, 14 aa, Artificial Sequence
  Cyclic GFR-binding peptide
  MOD_RES (1)..(1): Xaa is C or S
XVPTELSPISMLFI

SEQ ID NO: 3556 - protein, 17 aa, Artificial Sequence
  Cyclic GFR-binding peptide
  MOD_RES (3)..(4): Xaa is C or S
SPXXVSQDLNAISILYF

SEQ ID NO: 3557 - protein, 19 aa, Artificial Sequence
  Cyclic GFR-binding peptide
PTELNAISMLYFDEYDKVV

SEQ ID NO: 3558 - protein, 20 aa, Artificial Sequence
  Cyclic GFR-binding peptide
HQGQHPKIRMIQMTINSEET

SEQ ID NO: 3559 - protein, 29 aa, Artificial Sequence
  Cyclic GFR-binding peptide
  MOD_RES (23)..(23): Xaa is C or S
HQGQHPKIRMIQMTINSQGTPVXELGEDN

SEQ ID NO: 3560 - protein, 13 aa, Artificial Sequence
  Cyclic GFR-binding peptide
VKAVKVSRLQVQT

SEQ ID NO: 3561 - protein, 20 aa, Artificial Sequence
  Cyclic GFR-binding peptide
HQGQHPKIRIKRMQVPRQGT

SEQ ID NO: 3562 - protein, 13 aa, Artificial Sequence
  Cyclic GFR-binding peptide
IKRMQVPRQGTPV

SEQ ID NO: 3563 - protein, 18 aa, Artificial Sequence
  Cyclic GFR-binding peptide
  MOD_RES (16)..(16): Xaa is C or S
MIQVTINSLQVQTPRXQV

SEQ ID NO: 3564 - protein, 19 aa, Artificial Sequence
  Cyclic GFR-binding peptide
LKPKKRVYEMIQVTINSHH

SEQ ID NO: 3565 - protein, 14 aa, Artificial Sequence
  Cyclic GFR-binding peptide
IKRVQVPRHHVRSP

SEQ ID NO: 3566 - protein, 17 aa, Artificial Sequence
  Cyclic GFR-binding peptide
HQGQHPKIRIKRMQVPR

SEQ ID NO: 3567 - protein, 19 aa, Artificial Sequence
  Cyclic GFR-binding peptide
  MOD_RES (14)..(14): Xaa is C or S
IKRMQVPRQGTPVXELGED

SEQ ID NO: 3568 - protein, 14 aa, Artificial Sequence
  Cyclic GFR-binding peptide
  MOD_RES (14)..(14): Xaa is C or S
VKAMKVSREETPVX

SEQ ID NO: 3569 - protein, 21 aa, Artificial Sequence
  Cyclic GFR-binding peptide
FIPKKRVIEIKRVQVPRLQVQ

SEQ ID NO: 3570 - protein, 19 aa, Artificial Sequence
  Cyclic GFR-binding peptide
HQGQHPKIRMIQMTINSEE

SEQ ID NO: 3571 - protein, 18 aa, Artificial Sequence
  Cyclic GFR-binding peptide
FIPKKRVIEIKRVQVPRL

SEQ ID NO: 3572 - protein, 18 aa, Artificial Sequence
  Cyclic GFR-binding peptide
HQGQHPKIRIKRMQVPRE

SEQ ID NO: 3573 - protein, 15 aa, Artificial Sequence
  Cyclic GFR-binding peptide
  MOD_RES (14)..(14): Xaa is C or S
MIQMTINSEETPVXE

SEQ ID NO: 3574 - protein, 17 aa, Artificial Sequence
  Cyclic GFR-binding peptide
FIPKKRVIEIKRVQVPR

SEQ ID NO: 3575 - protein, 29 aa, Artificial Sequence
  Cyclic GFR-binding peptide
  MOD_RES (23)..(23): Xaa is C or S
HQGQHPKIRVKAMKVSRQGTPVXELGEDN

SEQ ID NO: 3576 - protein, 15 aa, Artificial Sequence
  Cyclic GFR-binding peptide
MIQVTINSLQVQTPR

SEQ ID NO: 3577 - protein, 15 aa, Artificial Sequence
  Cyclic GFR-binding peptide
VKAVKVSRLQVQTPR

SEQ ID NO: 3578 - protein, 19 aa, Artificial Sequence
  Cyclic GFR-binding peptide
FIPKKRVIEIKRVQVPRLQ

SEQ ID NO: 3579 - protein, 18 aa, Artificial Sequence
  Cyclic GFR-binding peptide
  MOD_RES (14)..(14): Xaa is C or S
MIQMTINSEETPVXELGE

SEQ ID NO: 3580 - protein, 20 aa, Artificial Sequence
  Cyclic GFR-binding peptide
  MOD_RES (16)..(16): Xaa is C or S
MIQVTINSLQVQTPRXQVNR

SEQ ID NO: 3581 - protein, 15 aa, Artificial Sequence
  Cyclic GFR-binding peptide
IKRVQVPRHHVRSPQ

SEQ ID NO: 3582 - protein, 14 aa, Artificial Sequence
  Cyclic GFR-binding peptide
  MOD_RES (14)..(14): Xaa is C or S
IKRMQVPRQGTPVX

SEQ ID NO: 3583 - protein, 16 aa, Artificial Sequence
  Cyclic GFR-binding peptide
  MOD_RES (14)..(14): Xaa is C or S
VKAMKVSRQGTPVXEL

SEQ ID NO: 3584 - protein, 19 aa, Artificial Sequence
  Cyclic GFR-binding peptide
  MOD_RES (16)..(16): Xaa is C or S
IKRVQVPRHHVRSPQXKVS

SEQ ID NO: 3585 - protein, 17 aa, Artificial Sequence
  Cyclic GFR-binding peptide
LKPKKRVYEVKAVKVSR

SEQ ID NO: 3586 - protein, 29 aa, Artificial Sequence
  Cyclic GFR-binding peptide
  MOD_RES (23)..(23): Xaa is C or S
HQGQHPKIRVKAMKVSREETPVXELGEDN

SEQ ID NO: 3587 - protein, 19 aa, Artificial Sequence
  Cyclic GFR-binding peptide
HQGQHPKIRIKRMQVPREE

SEQ ID NO: 3588 - protein, 20 aa, Artificial Sequence
  Cyclic GFR-binding peptide
  MOD_RES (16)..(16): Xaa is C or S
VKAVKVSRLQVQTPRXQVNR

SEQ ID NO: 3589 - protein, 17 aa, Artificial Sequence
  Cyclic GFR-binding peptide
  MOD_RES (14)..(14): Xaa is C or S
IKRMQVPREETPVXELG

SEQ ID NO: 3590 - protein, 17 aa, Artificial Sequence
  Cyclic GFR-binding peptide
  MOD_RES (14)..(14): Xaa is C or S
MIQMTINSEETPVXELG

SEQ ID NO: 3591 - protein, 13 aa, Artificial Sequence
  Cyclic GFR-binding peptide
MIQVTINSLQVQT

SEQ ID NO: 3592 - protein, 19 aa, Artificial Sequence
  Cyclic GFR-binding peptide
  MOD_RES (14)..(14): Xaa is C or S
VKAMKVSREETPVXELGED

SEQ ID NO: 3593 - protein, 21 aa, Artificial Sequence
  Cyclic GFR-binding peptide
LKPKKRVYEMIQVTINSHHVR

SEQ ID NO: 3594 - protein, 17 aa, Artificial Sequence
  Cyclic GFR-binding peptide
LKPKKRVYEIKRVQVPR

SEQ ID NO: 3595 - protein, 20 aa, Artificial Sequence
  Cyclic GFR-binding peptide
HQGQHPKIRVKAMKVSREET

SEQ ID NO: 3596 - protein, 19 aa, Artificial Sequence
  Cyclic GFR-binding peptide
LKPKKRVYEVKAVKVSRHH

SEQ ID NO: 3597 - protein, 13 aa, Artificial Sequence
  Cyclic GFR-binding peptide
VKAMKVSREETPV

SEQ ID NO: 3598 - protein, 20 aa, Artificial Sequence
  Cyclic GFR-binding peptide
  MOD_RES (14)..(14): Xaa is C or S
VKAMKVSREETPVXELGEDN

SEQ ID NO: 3599 - protein, 17 aa, Artificial Sequence
  Cyclic GFR-binding peptide
HQGQHPKIRMIQMTINS

SEQ ID NO: 3600 - protein, 16 aa, Artificial Sequence
  Cyclic GFR-binding peptide
  MOD_RES (14)..(14): Xaa is C or S
IKRMQVPREETPVXEL

SEQ ID NO: 3601 - protein, 20 aa, Artificial Sequence
  Cyclic GFR-binding peptide
  MOD_RES (14)..(14): Xaa is C or S
MIQMTINSEETPVXELGEDN

SEQ ID NO: 3602 - protein, 21 aa, Artificial Sequence
  Cyclic GFR-binding peptide
LKPKKRVYEIKRVQVPRHHVR

SEQ ID NO: 3603 - protein, 17 aa, Artificial Sequence
  Cyclic GFR-binding peptide
LKPKKRVYEMIQVTINS

SEQ ID NO: 3604 - protein, 29 aa, Artificial Sequence
  Cyclic GFR-binding peptide
  MOD_RES (23)..(23): Xaa is C or S
HQGQHPKIRMIQMTINSEETPVXELGEDN

SEQ ID NO: 3605 - protein, 18 aa, Artificial Sequence
  Cyclic GFR-binding peptide
  MOD_RES (16)..(16): Xaa is C or S
VKAVKVSRLQVQTPRXQV

SEQ ID NO: 3606 - protein, 17 aa, Artificial Sequence
  Cyclic GFR-binding peptide
  MOD_RES (16)..(16): Xaa is C or S
MIQVTINSHHVRSPQXK

SEQ ID NO: 3607 - protein, 16 aa, Artificial Sequence
  Cyclic GFR-binding peptide
  MOD_RES (16)..(16): Xaa is C or S
MIQVTINSLQVQTPRX

SEQ ID NO: 3608 - protein, 29 aa, Artificial Sequence
  Cyclic GFR-binding peptide
  MOD_RES (25)..(25): Xaa is C or S
LKPKKRVYEVKAVKVSRHHVRSPQXKVSS

SEQ ID NO: 3609 - protein, 14 aa, Artificial Sequence
  Cyclic GFR-binding peptide
MIQVTINSHHVRSP

SEQ ID NO: 3610 - protein, 17 aa, Artificial Sequence
  Cyclic GFR-binding peptide
FIPKKRVIEVKAVKVSR

SEQ ID NO: 3611 - protein, 21 aa, Artificial Sequence
  Cyclic GFR-binding peptide
HQGQHPKIRIKRMQVPREETP

SEQ ID NO: 3612 - protein, 19 aa, Artificial Sequence
  Cyclic GFR-binding peptide
HQGQHPKIRMIQMTINSQG

SEQ ID NO: 3613 - protein, 20 aa, Artificial Sequence
  Cyclic GFR-binding peptide
LKPKKRVYEIKRVQVPRHHV

SEQ ID NO: 3614 - protein, 20 aa, Artificial Sequence
  Cyclic GFR-binding peptide
HQGQHPKIRVKAMKVSRQGT

SEQ ID NO: 3615 - protein, 17 aa, Artificial Sequence
  Cyclic GFR-binding peptide
HQGQHPKIRVKAMKVSR

SEQ ID NO: 3616 - protein, 15 aa, Artificial Sequence
  Cyclic GFR-binding peptide
  MOD_RES (14)..(14): Xaa is C or S
VKAMKVSRQGTPVXE

SEQ ID NO: 3617 - protein, 21 aa, Artificial Sequence
  Cyclic GFR-binding peptide
HQGQHPKIRVKAMKVSRQGTP

SEQ ID NO: 3618 - protein, 21 aa, Artificial Sequence
  Cyclic GFR-binding peptide
LKPKKRVYEVKAVKVSRHHVR

SEQ ID NO: 3619 - protein, 18 aa, Artificial Sequence
  Cyclic GFR-binding peptide
HQGQHPKIRIKRMQVPRQ

SEQ ID NO: 3620 - protein, 20 aa, Artificial Sequence
  Cyclic GFR-binding peptide
  MOD_RES (16)..(16): Xaa is C or S
IKRVQVPRHHVRSPQXKVSS

SEQ ID NO: 3621 - protein, 20 aa, Artificial Sequence
  Cyclic GFR-binding peptide
HQGQHPKIRIKRMQVPREET

SEQ ID NO: 3622 - protein, 16 aa, Artificial Sequence
  Cyclic GFR-binding peptide
  MOD_RES (14)..(14): Xaa is C or S
MIQMTINSEETPVXEL

SEQ ID NO: 3623 - protein, 15 aa, Artificial Sequence
  Cyclic GFR-binding peptide
  MOD_RES (14)..(14): Xaa is C or S
VKAMKVSREETPVXE

SEQ ID NO: 3624 - protein, 14 aa, Artificial Sequence
  Cyclic GFR-binding peptide
  MOD_RES (14)..(14): Xaa is C or S
IKRMQVPREETPVX

SEQ ID NO: 3625 - protein, 19 aa, Artificial Sequence
  Cyclic GFR-binding peptide
  MOD_RES (14)..(14): Xaa is C or S
VKAMKVSRQGTPVXELGED

SEQ ID NO: 3626 - protein, 19 aa, Artificial Sequence
  Cyclic GFR-binding peptide
FIPKKRVIEMIQVTINSLQ

SEQ ID NO: 3627 - protein, 13 aa, Artificial Sequence
  Cyclic GFR-binding peptide
MIQVTINSHHVRS

SEQ ID NO: 3628 - protein, 14 aa, Artificial Sequence
  Cyclic GFR-binding peptide
  MOD_RES (14)..(14): Xaa is C or S
MIQMTINSEETPVX

SEQ ID NO: 3629 - protein, 15 aa, Artificial Sequence
  Cyclic GFR-binding peptide
MIQVTINSHHVRSPQ

SEQ ID NO: 3630 - protein, 18 aa, Artificial Sequence
  Cyclic GFR-binding peptide
HQGQHPKIRMIQMTINSE

SEQ ID NO: 3631 - protein, 14 aa, Artificial Sequence
  Cyclic GFR-binding peptide
  MOD_RES (14)..(14): Xaa is C or S
MIQMTINSQGTPVX

SEQ ID NO: 3632 - protein, 19 aa, Artificial Sequence
  Cyclic GFR-binding peptide
HQGQHPKIRIKRMQVPRQG

SEQ ID NO: 3633 - protein, 18 aa, Artificial Sequence
  Cyclic GFR-binding peptide
LKPKKRVYEVKAVKVSRH

SEQ ID NO: 3634 - protein, 20 aa, Artificial Sequence
  Cyclic GFR-binding peptide
  MOD_RES (16)..(16): Xaa is C or S
MIQVTINSHHVRSPQXKVSS

SEQ ID NO: 3635 - protein, 21 aa, Artificial Sequence
  Cyclic GFR-binding peptide
FIPKKRVIEVKAVKVSRLQVQ

SEQ ID NO: 3636 - protein, 20 aa, Artificial Sequence
  Cyclic GFR-binding peptide
LKPKKRVYEMIQVTINSHHV

SEQ ID NO: 3637 - protein, 18 aa, Artificial Sequence
  Cyclic GFR-binding peptide
FIPKKRVIEMIQVTINSL

SEQ ID NO: 3638 - protein, 19 aa, Artificial Sequence
  Cyclic GFR-binding peptide
  MOD_RES (16)..(16): Xaa is C or S
VKAVKVSRLQVQTPRXQVN

SEQ ID NO: 3639 - protein, 14 aa, Artificial Sequence
  Cyclic GFR-binding peptide
  MOD_RES (14)..(14): Xaa is C or S
VKAMKVSRQGTPVX

SEQ ID NO: 3640 - protein, 20 aa, Artificial Sequence
  Cyclic GFR-binding peptide
  MOD_RES (14)..(14): Xaa is C or S
MIQMTINSQGTPVXELGEDN

SEQ ID NO: 3641 - protein, 19 aa, Artificial Sequence
  Cyclic GFR-binding peptide
  MOD_RES (14)..(14): Xaa is C or S
IKRMQVPREETPVXELGED

SEQ ID NO: 3642 - protein, 21 aa, Artificial Sequence
  Cyclic GFR-binding peptide
HQGQHPKIRMIQMTINSEETP

SEQ ID NO: 3643 - protein, 21 aa, Artificial Sequence
  Cyclic GFR-binding peptide
HQGQHPKIRIKRMQVPRQGTP

SEQ ID NO: 3644 - protein, 18 aa, Artificial Sequence
  Cyclic GFR-binding peptide
  MOD_RES (14)..(14): Xaa is C or S
MIQMTINSQGTPVXELGE

SEQ ID NO: 3645 - protein, 29 aa, Artificial Sequence
  Cyclic GFR-binding peptide
  MOD_RES (25)..(25): Xaa is C or S
FIPKKRVIEMIQVTINSLQVQTPRXQVNR

SEQ ID NO: 3646 - protein, 16 aa, Artificial Sequence
  Cyclic GFR-binding peptide
  MOD_RES (14)..(14): Xaa is C or S
IKRMQVPRQGTPVXEL

SEQ ID NO: 3647 - protein, 13 aa, Artificial Sequence
  Cyclic GFR-binding peptide
IKRMQVPREETPV

SEQ ID NO: 3648 - protein, 18 aa, Artificial Sequence
  Cyclic GFR-binding peptide
  MOD_RES (16)..(16): Xaa is C or S
MIQVTINSHHVRSPQXKV

SEQ ID NO: 3649 - protein, 14 aa, Artificial Sequence
  Cyclic GFR-binding peptide
MIQVTINSLQVQTP

SEQ ID NO: 3650 - protein, 21 aa, Artificial Sequence
  Cyclic GFR-binding peptide
HQGQHPKIRVKAMKVSREETP

SEQ ID NO: 3651 - protein, 13 aa, Artificial Sequence
  Cyclic GFR-binding peptide
VKAMKVSRQGTPV

SEQ ID NO: 3652 - protein, 18 aa, Artificial Sequence
  Cyclic GFR-binding peptide
  MOD_RES (14)..(14): Xaa is C or S
VKAMKVSRQGTPVXELGE

SEQ ID NO: 3653 - protein, 16 aa, Artificial Sequence
  Cyclic GFR-binding peptide
  MOD_RES (16)..(16): Xaa is C or S
VKAVKVSRLQVQTPRX

SEQ ID NO: 3654 - protein, 18 aa, Artificial Sequence
  Cyclic GFR-binding peptide
HQGQHPKIRVKAMKVSRQ

SEQ ID NO: 3655 - protein, 14 aa, Artificial Sequence
  Cyclic GFR-binding peptide
VKAVKVSRLQVQTP

SEQ ID NO: 3656 - protein, 13 aa, Artificial Sequence
  Cyclic GFR-binding peptide
IKRVQVPRHHVRS

SEQ ID NO: 3657 - protein, 20 aa, Artificial Sequence
  Cyclic GFR-binding peptide
FIPKKRVIEVKAVKVSRLQV

SEQ ID NO: 3658 - protein, 29 aa, Artificial Sequence
  Cyclic GFR-binding peptide
  MOD_RES (23)..(23): Xaa is C or S
HQGQHPKIRIKRMQVPREETPVXELGEDN

SEQ ID NO: 3659 - protein, 20 aa, Artificial Sequence
  Cyclic GFR-binding peptide
FIPKKRVIEIKRVQVPRLQV

SEQ ID NO: 3660 - protein, 29 aa, Artificial Sequence
  Cyclic GFR-binding peptide
  MOD_RES (25)..(25): Xaa is C or S
FIPKKRVIEVKAVKVSRLQVQTPRXQVNR

SEQ ID NO: 3661 - protein, 17 aa, Artificial Sequence
  Cyclic GFR-binding peptide
  MOD_RES (14)..(14): Xaa is C or S
MIQMTINSQGTPVXELG

SEQ ID NO: 3662 - protein, 29 aa, Artificial Sequence
  Cyclic GFR-binding peptide
  MOD_RES (25)..(25): Xaa is C or S
FIPKKRVIEIKRVQVPRLQVQTPRXQVNR

SEQ ID NO: 3663 - protein, 20 aa, Artificial Sequence
  Cyclic GFR-binding peptide
  MOD_RES (14)..(14): Xaa is C or S
VKAMKVSRQGTPVXELGEDN

SEQ ID NO: 3664 - protein, 16 aa, Artificial Sequence
  Cyclic GFR-binding peptide
  MOD_RES (14)..(14): Xaa is C or S
MIQMTINSQGTPVXEL

SEQ ID NO: 3665 - protein, 17 aa, Artificial Sequence
  Cyclic GFR-binding peptide
  MOD_RES (16)..(16): Xaa is C or S
MIQVTINSLQVQTPRXQ

SEQ ID NO: 3666 - protein, 17 aa, Artificial Sequence
  Cyclic GFR-binding peptide
  MOD_RES (14)..(14): Xaa is C or S
VKAMKVSRQGTPVXELG

SEQ ID NO: 3667 - protein, 18 aa, Artificial Sequence
  Cyclic GFR-binding peptide
  MOD_RES (14)..(14): Xaa is C or S
IKRMQVPREETPVXELGE

SEQ ID NO: 3668 - protein, 20 aa, Artificial Sequence
  Cyclic GFR-binding peptide
FIPKKRVIEMIQVTINSLQV

SEQ ID NO: 3669 - protein, 18 aa, Artificial Sequence
  Cyclic GFR-binding peptide
HQGQHPKIRMIQMTINSQ

SEQ ID NO: 3670 - protein, 13 aa, Artificial Sequence
  Cyclic GFR-binding peptide
MIQMTINSEETPV

SEQ ID NO: 3671 - protein, 18 aa, Artificial Sequence
  Cyclic GFR-binding peptide
HQGQHPKIRVKAMKVSRE

SEQ ID NO: 3672 - protein, 13 aa, Artificial Sequence
  Cyclic GFR-binding peptide
MIQMTINSQGTPV

SEQ ID NO: 3673 - protein, 19 aa, Artificial Sequence
  Cyclic GFR-binding peptide
  MOD_RES (14)..(14): Xaa is C or S
MIQMTINSQGTPVXELGED

SEQ ID NO: 3674 - protein, 18 aa, Artificial Sequence
  Cyclic GFR-binding peptide
  MOD_RES (16)..(16): Xaa is C or S
IKRVQVPRHHVRSPQXKV

SEQ ID NO: 3675 - protein, 18 aa, Artificial Sequence
  Cyclic GFR-binding peptide
  MOD_RES (14)..(14): Xaa is C or S
IKRMQVPRQGTPVXELGE

SEQ ID NO: 3676 - protein, 20 aa, Artificial Sequence
  Cyclic GFR-binding peptide
  MOD_RES (14)..(14): Xaa is C or S
IKRMQVPRQGTPVXELGEDN

SEQ ID NO: 3677 - protein, 17 aa, Artificial Sequence
  Cyclic GFR-binding peptide
  MOD_RES (16)..(16): Xaa is C or S
VKAVKVSRLQVQTPRXQ

SEQ ID NO: 3678 - protein, 20 aa, Artificial Sequence
  Cyclic GFR-binding peptide
HQGQHPKIRMIQMTINSQGT

SEQ ID NO: 3679 - protein, 29 aa, Artificial Sequence
  Cyclic GFR-binding peptide
  MOD_RES (23)..(23): Xaa is C or S
HQGQHPKIRIKRMQVPRQGTPVXELGEDN

SEQ ID NO: 3680 - protein, 17 aa, Artificial Sequence
  Cyclic GFR-binding peptide
  MOD_RES (16)..(16): Xaa is C or S
IKRVQVPRHHVRSPQXK

SEQ ID NO: 3681 - protein, 21 aa, Artificial Sequence
  Cyclic GFR-binding peptide
HQGQHPKIRMIQMTINSQGTP

SEQ ID NO: 3682 - protein, 15 aa, Artificial Sequence
  Cyclic GFR-binding peptide
  MOD_RES (14)..(14): Xaa is C or S
IKRMQVPRQGTPVXE

SEQ ID NO: 3683 - protein, 20 aa, Artificial Sequence
  Cyclic GFR-binding peptide
  MOD_RES (14)..(14): Xaa is C or S
IKRMQVPREETPVXELGEDN

SEQ ID NO: 3684 - protein, 17 aa, Artificial Sequence
  Cyclic GFR-binding peptide
  MOD_RES (14)..(14): Xaa is C or S
VKAMKVSREETPVXELG

SEQ ID NO: 3685 - protein, 19 aa, Artificial Sequence
  Cyclic GFR-binding peptide
LKPKKRVYEIKRVQVPRHH

SEQ ID NO: 3686 - protein, 19 aa, Artificial Sequence
  Cyclic GFR-binding peptide
  MOD_RES (14)..(14): Xaa is C or S
MIQMTINSEETPVXELGED

SEQ ID NO: 3687 - protein, 17 aa, Artificial Sequence
  Cyclic GFR-binding peptide
  MOD_RES (14)..(14): Xaa is C or S
IKRMQVPRQGTPVXELG

SEQ ID NO: 3688 - protein, 19 aa, Artificial Sequence
  Cyclic GFR-binding peptide
  MOD_RES (16)..(16): Xaa is C or S
MIQVTINSHHVRSPQXKVS

SEQ ID NO: 3689 - protein, 19 aa, Artificial Sequence
  Cyclic GFR-binding peptide
HQGQHPKIRVKAMKVSREE

SEQ ID NO: 3690 - protein, 16 aa, Artificial Sequence
  Cyclic GFR-binding peptide
  MOD_RES (14)..(14): Xaa is C or S
VKAMKVSREETPVXEL

SEQ ID NO: 3691 - protein, 18 aa, Artificial Sequence
  Cyclic GFR-binding peptide
  MOD_RES (14)..(14): Xaa is C or S
VKAMKVSREETPVXELGE

SEQ ID NO: 3692 - protein, 16 aa, Artificial Sequence
  Cyclic GFR-binding peptide
  MOD_RES (16)..(16): Xaa is C or S
IKRVQVPRHHVRSPQX

SEQ ID NO: 3693 - protein, 19 aa, Artificial Sequence
  Cyclic GFR-binding peptide
HQGQHPKIRVKAMKVSRQG

SEQ ID NO: 3694 - protein, 19 aa, Artificial Sequence
  Cyclic GFR-binding peptide
  MOD_RES (16)..(16): Xaa is C or S
MIQVTINSLQVQTPRXQVN

SEQ ID NO: 3695 - protein, 16 aa, Artificial Sequence
  Cyclic GFR-binding peptide
  MOD_RES (16)..(16): Xaa is C or S
MIQVTINSHHVRSPQX

SEQ ID NO: 3696 - protein, 29 aa, Artificial Sequence
  Cyclic GFR-binding peptide
  MOD_RES (25)..(25): Xaa is C or S
LKPKKRVYEMIQVTINSHHVRSPQXKVSS

SEQ ID NO: 3697 - protein, 18 aa, Artificial Sequence
  Cyclic GFR-binding peptide
LKPKKRVYEIKRVQVPRH

SEQ ID NO: 3698 - protein, 15 aa, Artificial Sequence
  Cyclic GFR-binding peptide
  MOD_RES (14)..(14): Xaa is C or S
MIQMTINSQGTPVXE

SEQ ID NO: 3699 - protein, 15 aa, Artificial Sequence
  Cyclic GFR-binding peptide
  MOD_RES (14)..(14): Xaa is C or S
IKRMQVPREETPVXE

SEQ ID NO: 3700 - protein, 21 aa, Artificial Sequence
  Cyclic GFR-binding peptide
FIPKKRVIEMIQVTINSLQVQ

SEQ ID NO: 3701 - protein, 18 aa, Artificial Sequence
  Cyclic GFR-binding peptide
FIPKKRVIEVKAVKVSRL

SEQ ID NO: 3702 - protein, 20 aa, Artificial Sequence
  Cyclic GFR-binding peptide
LKPKKRVYEVKAVKVSRHHV

SEQ ID NO: 3703 - protein, 18 aa, Artificial Sequence
  Cyclic GFR-binding peptide
LKPKKRVYEMIQVTINSH

SEQ ID NO: 3704 - protein, 17 aa, Artificial Sequence
  Cyclic GFR-binding peptide
FIPKKRVIEMIQVTINS

SEQ ID NO: 3705 - protein, 29 aa, Artificial Sequence
  Cyclic GFR-binding peptide
  MOD_RES (25)..(25): Xaa is C or S
LKPKKRVYEIKRVQVPRHHVRSPQXKVSS

SEQ ID NO: 3706 - protein, 19 aa, Artificial Sequence
  Cyclic GFR-binding peptide
FIPKKRVIEVKAVKVSRLQ

SEQ ID NO: 3707 - protein, 13 aa, Artificial Sequence
  Cyclic GFR-binding peptide
TQVQLRSVKVAKV

SEQ ID NO: 3708 - protein, 20 aa, Artificial Sequence
  Cyclic GFR-binding peptide
TGQRPVQMRKIRIKPHQGQH

SEQ ID NO: 3709 - protein, 13 aa, Artificial Sequence
  Cyclic GFR-binding peptide
VPTGQRPVQMRKI

SEQ ID NO: 3710 - protein, 18 aa, Artificial Sequence
  Cyclic GFR-binding peptide
  MOD_RES (3)..(3): Xaa is C or S
VQXRPTQVQLSNITVQIM

SEQ ID NO: 3711 - protein, 19 aa, Artificial Sequence
  Cyclic GFR-binding peptide
HHSNITVQIMEYVRKKPKL

SEQ ID NO: 3712 - protein, 14 aa, Artificial Sequence
  Cyclic GFR-binding peptide
PSRVHHRPVQVRKI

SEQ ID NO: 3713 - protein, 17 aa, Artificial Sequence
  Cyclic GFR-binding peptide
RPVQMRKIRIKPHQGQH

SEQ ID NO: 3714 - protein, 19 aa, Artificial Sequence
  Cyclic GFR-binding peptide
  MOD_RES (6)..(6): Xaa is C or S
DEGLEXVPTGQRPVQMRKI

SEQ ID NO: 3715 - protein, 14 aa, Artificial Sequence
  Cyclic GFR-binding peptide
  MOD_RES (1)..(1): Xaa is C or S
XVPTEERSVKMAKV

SEQ ID NO: 3716 - protein, 18 aa, Artificial Sequence
  Cyclic GFR-binding peptide
ERPVQMRKIRIKPHQGQH

SEQ ID NO: 3717 - protein, 29 aa, Artificial Sequence
  Cyclic GFR-binding peptide
  MOD_RES (7)..(7): Xaa is C or S
NDEGLEXVPTGQRSVKMAKVRIKPHQGQH

SEQ ID NO: 3718 - protein, 15 aa, Artificial Sequence
  Cyclic GFR-binding peptide
RPTQVQLSNITVQIM

SEQ ID NO: 3719 - protein, 15 aa, Artificial Sequence
  Cyclic GFR-binding peptide
RPTQVQLRSVKVAKV

SEQ ID NO: 3720 - protein, 20 aa, Artificial Sequence
  Cyclic GFR-binding peptide
  MOD_RES (5)..(5): Xaa is C or S
RNVQXRPTQVQLSNITVQIM

SEQ ID NO: 3721 - protein, 15 aa, Artificial Sequence
  Cyclic GFR-binding peptide
QPSRVHHRPVQVRKI

SEQ ID NO: 3722 - protein, 14 aa, Artificial Sequence
  Cyclic GFR-binding peptide
  MOD_RES (1)..(1): Xaa is C or S
XVPTGQRPVQMRKI

SEQ ID NO: 3723 - protein, 16 aa, Artificial Sequence
  Cyclic GFR-binding peptide
  MOD_RES (3)..(3): Xaa is C or S
LEXVPTGQRSVKMAKV

SEQ ID NO: 3724 - protein, 19 aa, Artificial Sequence
  Cyclic GFR-binding peptide
  MOD_RES (4)..(4): Xaa is C or S
SVKXQPSRVHHRPVQVRKI

SEQ ID NO: 3725 - protein, 29 aa, Artificial Sequence
  Cyclic GFR-binding peptide
  MOD_RES (7)..(7): Xaa is C or S
NDEGLEXVPTEERSVKMAKVRIKPHQGQH

SEQ ID NO: 3726 - protein, 19 aa, Artificial Sequence
  Cyclic GFR-binding peptide
EERPVQMRKIRIKPHQGQH

SEQ ID NO: 3727 - protein, 20 aa, Artificial Sequence
  Cyclic GFR-binding peptide
  MOD_RES (5)..(5): Xaa is C or S
RNVQXRPTQVQLRSVKVAKV

SEQ ID NO: 3728 - protein, 17 aa, Artificial Sequence
  Cyclic GFR-binding peptide
  MOD_RES (4)..(4): Xaa is C or S
GLEXVPTEERPVQMRKI

SEQ ID NO: 3729 - protein, 13 aa, Artificial Sequence
  Cyclic GFR-binding peptide
TQVQLSNITVQIM

SEQ ID NO: 3730 - protein, 19 aa, Artificial Sequence
  Cyclic GFR-binding peptide
  MOD_RES (6)..(6): Xaa is C or S
DEGLEXVPTEERSVKMAKV

SEQ ID NO: 3731 - protein, 21 aa, Artificial Sequence
  Cyclic GFR-binding peptide
RVHHSNITVQIMEYVRKKPKL

SEQ ID NO: 3732 - protein, 17 aa, Artificial Sequence
  Cyclic GFR-binding peptide
RPVQVRKIEYVRKKPKL

SEQ ID NO: 3733 - protein, 20 aa, Artificial Sequence
  Cyclic GFR-binding peptide
TEERSVKMAKVRIKPHQGQH

SEQ ID NO: 3734 - protein, 13 aa, Artificial Sequence
  Cyclic GFR-binding peptide
VPTEERSVKMAKV

SEQ ID NO: 3735 - protein, 20 aa, Artificial Sequence
  Cyclic GFR-binding peptide
  MOD_RES (7)..(7): Xaa is C or S
NDEGLEXVPTEERSVKMAKV

SEQ ID NO: 3736 - protein, 16 aa, Artificial Sequence
  Cyclic GFR-binding peptide
  MOD_RES (3)..(3): Xaa is C or S
LEXVPTEERPVQMRKI

SEQ ID NO: 3737 - protein, 21 aa, Artificial Sequence
  Cyclic GFR-binding peptide
RVHHRPVQVRKIEYVRKKPKL

SEQ ID NO: 3738 - protein, 17 aa, Artificial Sequence
  Cyclic GFR-binding peptide
SNITVQIMEYVRKKPKL

SEQ ID NO: 3739 - protein, 18 aa, Artificial Sequence
  Cyclic GFR-binding peptide
  MOD_RES (3)..(3): Xaa is C or S
VQXRPTQVQLRSVKVAKV

SEQ ID NO: 3740 - protein, 17 aa, Artificial Sequence
  Cyclic GFR-binding peptide
  MOD_RES (2)..(2): Xaa is C or S
KXQPSRVHHSNITVQIM

SEQ ID NO: 3741 - protein, 16 aa, Artificial Sequence
  Cyclic GFR-binding peptide
  MOD_RES (1)..(1): Xaa is C or S
XRPTQVQLSNITVQIM

SEQ ID NO: 3742 - protein, 14 aa, Artificial Sequence
  Cyclic GFR-binding peptide
PSRVHHSNITVQIM

SEQ ID NO: 3743 - protein, 17 aa, Artificial Sequence
  Cyclic GFR-binding peptide
RSVKVAKVEIVRKKPIF

SEQ ID NO: 3744 - protein, 21 aa, Artificial Sequence
  Cyclic GFR-binding peptide
PTEERPVQMRKIRIKPHQGQH

SEQ ID NO: 3745 - protein, 20 aa, Artificial Sequence
  Cyclic GFR-binding peptide
VHHRPVQVRKIEYVRKKPKL

SEQ ID NO: 3746 - protein, 20 aa, Artificial Sequence
  Cyclic GFR-binding peptide
TGQRSVKMAKVRIKPHQGQH

SEQ ID NO: 3747 - protein, 17 aa, Artificial Sequence
  Cyclic GFR-binding peptide
RSVKMAKVRIKPHQGQH

SEQ ID NO: 3748 - protein, 15 aa, Artificial Sequence
  Cyclic GFR-binding peptide
  MOD_RES (2)..(2): Xaa is C or S
EXVPTGQRSVKMAKV

SEQ ID NO: 3749 - protein, 21 aa, Artificial Sequence
  Cyclic GFR-binding peptide
PTGQRSVKMAKVRIKPHQGQH

SEQ ID NO: 3750 - protein, 18 aa, Artificial Sequence
  Cyclic GFR-binding peptide
QRPVQMRKIRIKPHQGQH

SEQ ID NO: 3751 - protein, 20 aa, Artificial Sequence
  Cyclic GFR-binding peptide
  MOD_RES (5)..(5): Xaa is C or S
SSVKXQPSRVHHRPVQVRKI

SEQ ID NO: 3752 - protein, 20 aa, Artificial Sequence
  Cyclic GFR-binding peptide
TEERPVQMRKIRIKPHQGQH

SEQ ID NO: 3753 - protein, 15 aa, Artificial Sequence
  Cyclic GFR-binding peptide
  MOD_RES (2)..(2): Xaa is C or S
EXVPTEERSVKMAKV

SEQ ID NO: 3754 - protein, 14 aa, Artificial Sequence
  Cyclic GFR-binding peptide
  MOD_RES (1)..(1): Xaa is C or S
XVPTEERPVQMRKI

SEQ ID NO: 3755 - protein, 19 aa, Artificial Sequence
  Cyclic GFR-binding peptide
  MOD_RES (6)..(6): Xaa is C or S
DEGLEXVPTGQRSVKMAKV

SEQ ID NO: 3756 - protein, 19 aa, Artificial Sequence
  Cyclic GFR-binding peptide
QLSNITVQIMEIVRKKPIF

SEQ ID NO: 3757 - protein, 13 aa, Artificial Sequence
  Cyclic GFR-binding peptide
SRVHHSNITVQIM

SEQ ID NO: 3758 - protein, 15 aa, Artificial Sequence
  Cyclic GFR-binding peptide
QPSRVHHSNITVQIM

SEQ ID NO: 3759 - protein, 19 aa, Artificial Sequence
  Cyclic GFR-binding peptide
GQRPVQMRKIRIKPHQGQH

SEQ ID NO: 3760 - protein, 20 aa, Artificial Sequence
  Cyclic GFR-binding peptide
  MOD_RES (5)..(5): Xaa is C or S
SSVKXQPSRVHHSNITVQIM

SEQ ID NO: 3761 - protein, 21 aa, Artificial Sequence
  Cyclic GFR-binding peptide
QVQLRSVKVAKVEIVRKKPIF

SEQ ID NO: 3762 - protein, 20 aa, Artificial Sequence
  Cyclic GFR-binding peptide
VHHSNITVQIMEYVRKKPKL

SEQ ID NO: 3763 - protein, 18 aa, Artificial Sequence
  Cyclic GFR-binding peptide
LSNITVQIMEIVRKKPIF

SEQ ID NO: 3764 - protein, 19 aa, Artificial Sequence
  Cyclic GFR-binding peptide
  MOD_RES (4)..(4): Xaa is C or S
NVQXRPTQVQLRSVKVAKV

SEQ ID NO: 3765 - protein, 14 aa, Artificial Sequence
  Cyclic GFR-binding peptide
  MOD_RES (1)..(1): Xaa is C or S
XVPTGQRSVKMAKV

SEQ ID NO: 3766 - protein, 19 aa, Artificial Sequence
  Cyclic GFR-binding peptide
  MOD_RES (6)..(6): Xaa is C or S
DEGLEXVPTEERPVQMRKI

SEQ ID NO: 3767 - protein, 21 aa, Artificial Sequence
  Cyclic GFR-binding peptide
PTGQRPVQMRKIRIKPHQGQH

SEQ ID NO: 3768 - protein, 29 aa, Artificial Sequence
  Cyclic GFR-binding peptide
  MOD_RES (5)..(5): Xaa is C or S
RNVQXRPTQVQLSNITVQIMEIVRKKPIF

SEQ ID NO: 3769 - protein, 16 aa, Artificial Sequence
  Cyclic GFR-binding peptide
  MOD_RES (3)..(3): Xaa is C or S
LEXVPTGQRPVQMRKI

SEQ ID NO: 3770 - protein, 13 aa, Artificial Sequence
  Cyclic GFR-binding peptide
VPTEERPVQMRKI

SEQ ID NO: 3771 - protein, 18 aa, Artificial Sequence
  Cyclic GFR-binding peptide
  MOD_RES (3)..(3): Xaa is C or S
VKXQPSRVHHSNITVQIM

SEQ ID NO: 3772 - protein, 14 aa, Artificial Sequence
  Cyclic GFR-binding peptide
PTQVQLSNITVQIM

SEQ ID NO: 3773 - protein, 21 aa, Artificial Sequence
  Cyclic GFR-binding peptide
PTEERSVKMAKVRIKPHQGQH

SEQ ID NO: 3774 - protein, 13 aa, Artificial Sequence
  Cyclic GFR-binding peptide
VPTGQRSVKMAKV

SEQ ID NO: 3775 - protein, 18 aa, Artificial Sequence
  Cyclic GFR-binding peptide
  MOD_RES (5)..(5): Xaa is C or S
EGLEXVPTGQRSVKMAKV

SEQ ID NO: 3776 - protein, 16 aa, Artificial Sequence
  Cyclic GFR-binding peptide
  MOD_RES (1)..(1): Xaa is C or S
XRPTQVQLRSVKVAKV

SEQ ID NO: 3777 - protein, 18 aa, Artificial Sequence
  Cyclic GFR-binding peptide
QRSVKMAKVRIKPHQGQH

SEQ ID NO: 3778 - protein, 14 aa, Artificial Sequence
  Cyclic GFR-binding peptide
PTQVQLRSVKVAKV

SEQ ID NO: 3779 - protein, 13 aa, Artificial Sequence
  Cyclic GFR-binding peptide
SRVHHRPVQVRKI

SEQ ID NO: 3780 - protein, 20 aa, Artificial Sequence
  Cyclic GFR-binding peptide
VQLRSVKVAKVEIVRKKPIF

SEQ ID NO: 3781 - protein, 29 aa, Artificial Sequence
  Cyclic GFR-binding peptide
  MOD_RES (7)..(7): Xaa is C or S
NDEGLEXVPTEERPVQMRKIRIKPHQGQH

SEQ ID NO: 3782 - protein, 29 aa, Artificial Sequence
  Cyclic GFR-binding peptide
  MOD_RES (5)..(5): Xaa is C or S
RNVQXRPTQVQLRSVKVAKVEIVRKKPIF

SEQ ID NO: 3783 - protein, 20 aa, Artificial Sequence
  Cyclic GFR-binding peptide
  MOD_RES (7)..(7): Xaa is C or S
NDEGLEXVPTGQRSVKMAKV

SEQ ID NO: 3784 - protein, 17 aa, Artificial Sequence
  Cyclic GFR-binding peptide
  MOD_RES (2)..(2): Xaa is C or S
QXRPTQVQLSNITVQIM

SEQ ID NO: 3785 - protein, 17 aa, Artificial Sequence
  Cyclic GFR-binding peptide
  MOD_RES (4)..(4): Xaa is C or S
GLEXVPTGQRSVKMAKV

SEQ ID NO: 3786 - protein, 18 aa, Artificial Sequence
  Cyclic GFR-binding peptide
  MOD_RES (5)..(5): Xaa is C or S
EGLEXVPTEERPVQMRKI

SEQ ID NO: 3787 - protein, 20 aa, Artificial Sequence
  Cyclic GFR-binding peptide
VQLSNITVQIMEIVRKKPIF

SEQ ID NO: 3788 - protein, 18 aa, Artificial Sequence
  Cyclic GFR-binding peptide
ERSVKMAKVRIKPHQGQH

SEQ ID NO: 3789 - protein, 18 aa, Artificial Sequence
  Cyclic GFR-binding peptide
  MOD_RES (3)..(3): Xaa is C or S
VKXQPSRVHHRPVQVRKI

SEQ ID NO: 3790 - protein, 18 aa, Artificial Sequence
  Cyclic GFR-binding peptide
  MOD_RES (5)..(5): Xaa is C or S
EGLEXVPTGQRPVQMRKI

SEQ ID NO: 3791 - protein, 20 aa, Artificial Sequence
  Cyclic GFR-binding peptide
  MOD_RES (7)..(7): Xaa is C or S
NDEGLEXVPTGQRPVQMRKI

SEQ ID NO: 3792 - protein, 17 aa, Artificial Sequence
  Cyclic GFR-binding peptide
  MOD_RES (2)..(2): Xaa is C or S
QXRPTQVQLRSVKVAKV

SEQ ID NO: 3793 - protein, 29 aa, Artificial Sequence
  Cyclic GFR-binding peptide
  MOD_RES (7)..(7): Xaa is C or S
NDEGLEXVPTGQRPVQMRKIRIKPHQGQH

SEQ ID NO: 3794 - protein, 17 aa, Artificial Sequence
  Cyclic GFR-binding peptide
  MOD_RES (2)..(2): Xaa is C or S
KXQPSRVHHRPVQVRKI

SEQ ID NO: 3795 - protein, 15 aa, Artificial Sequence
  Cyclic GFR-binding peptide
  MOD_RES (2)..(2): Xaa is C or S
EXVPTGQRPVQMRKI

SEQ ID NO: 3796 - protein, 20 aa, Artificial Sequence
  Cyclic GFR-binding peptide
  MOD_RES (7)..(7): Xaa is C or S
NDEGLEXVPTEERPVQMRKI

SEQ ID NO: 3797 - protein, 17 aa, Artificial Sequence
  Cyclic GFR-binding peptide
  MOD_RES (4)..(4): Xaa is C or S
GLEXVPTEERSVKMAKV

SEQ ID NO: 3798 - protein, 19 aa, Artificial Sequence
  Cyclic GFR-binding peptide
HHRPVQVRKIEYVRKKPKL

SEQ ID NO: 3799 - protein, 17 aa, Artificial Sequence
  Cyclic GFR-binding peptide
  MOD_RES (4)..(4): Xaa is C or S
GLEXVPTGQRPVQMRKI

SEQ ID NO: 3800 - protein, 19 aa, Artificial Sequence
  Cyclic GFR-binding peptide
  MOD_RES (4)..(4): Xaa is C or S
SVKXQPSRVHHSNITVQIM

SEQ ID NO: 3801 - protein, 19 aa, Artificial Sequence
  Cyclic GFR-binding peptide
EERSVKMAKVRIKPHQGQH

SEQ ID NO: 3802 - protein, 16 aa, Artificial Sequence
  Cyclic GFR-binding peptide
  MOD_RES (3)..(3): Xaa is C or S
LEXVPTEERSVKMAKV

SEQ ID NO: 3803 - protein, 18 aa, Artificial Sequence
  Cyclic GFR-binding peptide
  MOD_RES (5)..(5): Xaa is C or S
EGLEXVPTEERSVKMAKV

SEQ ID NO: 3804 - protein, 16 aa, Artificial Sequence
  Cyclic GFR-binding peptide
  MOD_RES (1)..(1): Xaa is C or S
XQPSRVHHRPVQVRKI

SEQ ID NO: 3805 - protein, 19 aa, Artificial Sequence
  Cyclic GFR-binding peptide
GQRSVKMAKVRIKPHQGQH

SEQ ID NO: 3806 - protein, 19 aa, Artificial Sequence
  Cyclic GFR-binding peptide
  MOD_RES (4)..(4): Xaa is C or S
NVQXRPTQVQLSNITVQIM

SEQ ID NO: 3807 - protein, 16 aa, Artificial Sequence
  Cyclic GFR-binding peptide
  MOD_RES (1)..(1): Xaa is C or S
XQPSRVHHSNITVQIM

SEQ ID NO: 3808 - protein, 29 aa, Artificial Sequence
  Cyclic GFR-binding peptide
  MOD_RES (5)..(5): Xaa is C or S
SSVKXQPSRVHHSNITVQIMEYVRKKPKL

SEQ ID NO: 3809 - protein, 18 aa, Artificial Sequence
  Cyclic GFR-binding peptide
HRPVQVRKIEYVRKKPKL

SEQ ID NO: 3810 - protein, 15 aa, Artificial Sequence
  Cyclic GFR-binding peptide
  MOD_RES (2)..(2): Xaa is C or S
EXVPTEERPVQMRKI

SEQ ID NO: 3811 - protein, 21 aa, Artificial Sequence
  Cyclic GFR-binding peptide
QVQLSNITVQIMEIVRKKPIF

SEQ ID NO: 3812 - protein, 18 aa, Artificial Sequence
  Cyclic GFR-binding peptide
LRSVKVAKVEIVRKKPIF

SEQ ID NO: 3813 - protein, 18 aa, Artificial Sequence
  Cyclic GFR-binding peptide
HSNITVQIMEYVRKKPKL

SEQ ID NO: 3814 - protein, 17 aa, Artificial Sequence
  Cyclic GFR-binding peptide
SNITVQIMEIVRKKPIF

SEQ ID NO: 3815 - protein, 29 aa, Artificial Sequence
  Cyclic GFR-binding peptide
  MOD_RES (5)..(5): Xaa is C or S
SSVKXQPSRVHHRPVQVRKIEYVRKKPKL

SEQ ID NO: 3816 - protein, 19 aa, Artificial Sequence
  Cyclic GFR-binding peptide
QLRSVKVAKVEIVRKKPIF

SEQ ID NO: 3817 - protein, 20 aa, Artificial Sequence
  Cyclic GFR-binding peptide
HQGQHPKIRMIQMTINSEET

SEQ ID NO: 3818 - protein, 29 aa, Artificial Sequence
  Cyclic GFR-binding peptide
  MOD_RES (23)..(23): Xaa is C or S
HQGQHPKIRMIQMTINSQGTPVXELGEDN

SEQ ID NO: 3819 - protein, 13 aa, Artificial Sequence
  Cyclic GFR-binding peptide
VKAVKVSRLQVQT

SEQ ID NO: 3820 - protein, 20 aa, Artificial Sequence
  Cyclic GFR-binding peptide
HQGQHPKIRIKRMQVPRQGT

SEQ ID NO: 3821 - protein, 13 aa, Artificial Sequence
  Cyclic GFR-binding peptide
IKRMQVPRQGTPV

SEQ ID NO: 3822 - protein, 18 aa, Artificial Sequence
  Cyclic GFR-binding peptide
  MOD_RES (16)..(16): Xaa is C or S
MIQVTINSLQVQTPRXQV

SEQ ID NO: 3823 - protein, 19 aa, Artificial Sequence
  Cyclic GFR-binding peptide
LKPKKRVYEMIQVTINSHH

SEQ ID NO: 3824 - protein, 14 aa, Artificial Sequence
  Cyclic GFR-binding peptide
IKRVQVPRHHVRSP

SEQ ID NO: 3825 - protein, 17 aa, Artificial Sequence
  Cyclic GFR-binding peptide
HQGQHPKIRIKRMQVPR

SEQ ID NO: 3826 - protein, 19 aa, Artificial Sequence
  Cyclic GFR-binding peptide
  MOD_RES (14)..(14): Xaa is C or S
IKRMQVPRQGTPVXELGED

SEQ ID NO: 3827 - protein, 14 aa, Artificial Sequence
  Cyclic GFR-binding peptide
  MOD_RES (14)..(14): Xaa is C or S
VKAMKVSREETPVX

SEQ ID NO: 3828 - protein, 21 aa, Artificial Sequence
  Cyclic GFR-binding peptide
FIPKKRVIEIKRVQVPRLQVQ

SEQ ID NO: 3829 - protein, 19 aa, Artificial Sequence
  Cyclic GFR-binding peptide
HQGQHPKIRMIQMTINSEE

SEQ ID NO: 3830 - protein, 18 aa, Artificial Sequence
  Cyclic GFR-binding peptide
FIPKKRVIEIKRVQVPRL

SEQ ID NO: 3831 - protein, 18 aa, Artificial Sequence
  Cyclic GFR-binding peptide
HQGQHPKIRIKRMQVPRE

SEQ ID NO: 3832 - protein, 15 aa, Artificial Sequence
  Cyclic GFR-binding peptide
  MOD_RES (14)..(14): Xaa is C or S
MIQMTINSEETPVXE

SEQ ID NO: 3833 - protein, 17 aa, Artificial Sequence
  Cyclic GFR-binding peptide
FIPKKRVIEIKRVQVPR

SEQ ID NO: 3834 - protein, 29 aa, Artificial Sequence
  Cyclic GFR-binding peptide
  MOD_RES (23)..(23): Xaa is C or S
HQGQHPKIRVKAMKVSRQGTPVXELGEDN

SEQ ID NO: 3835 - protein, 15 aa, Artificial Sequence
  Cyclic GFR-binding peptide
MIQVTINSLQVQTPR

SEQ ID NO: 3836 - protein, 15 aa, Artificial Sequence
  Cyclic GFR-binding peptide
VKAVKVSRLQVQTPR

SEQ ID NO: 3837 - protein, 19 aa, Artificial Sequence
  Cyclic GFR-binding peptide
FIPKKRVIEIKRVQVPRLQ

SEQ ID NO: 3838 - protein, 18 aa, Artificial Sequence
  Cyclic GFR-binding peptide
  MOD_RES (14)..(14): Xaa is C or S
MIQMTINSEETPVXELGE

SEQ ID NO: 3839 - protein, 20 aa, Artificial Sequence
  Cyclic GFR-binding peptide
  MOD_RES (16)..(16): Xaa is C or S
MIQVTINSLQVQTPRXQVNR

SEQ ID NO: 3840 - protein, 15 aa, Artificial Sequence
  Cyclic GFR-binding peptide
IKRVQVPRHHVRSPQ

SEQ ID NO: 3841 - protein, 14 aa, Artificial Sequence
  Cyclic GFR-binding peptide
  MOD_RES (14)..(14): Xaa is C or S
IKRMQVPRQGTPVX

SEQ ID NO: 3842 - protein, 16 aa, Artificial Sequence
  Cyclic GFR-binding peptide
  MOD_RES (14)..(14): Xaa is C or S
VKAMKVSRQGTPVXEL

SEQ ID NO: 3843 - protein, 19 aa, Artificial Sequence
  Cyclic GFR-binding peptide
  MOD_RES (16)..(16): Xaa is C or S
IKRVQVPRHHVRSPQXKVS

SEQ ID NO: 3844 - protein, 17 aa, Artificial Sequence
  Cyclic GFR-binding peptide
LKPKKRVYEVKAVKVSR

SEQ ID NO: 3845 - protein, 29 aa, Artificial Sequence
  Cyclic GFR-binding peptide
  MOD_RES (23)..(23): Xaa is C or S
HQGQHPKIRVKAMKVSREETPVXELGEDN

SEQ ID NO: 3846 - protein, 19 aa, Artificial Sequence
  Cyclic GFR-binding peptide
HQGQHPKIRIKRMQVPREE

SEQ ID NO: 3847 - protein, 20 aa, Artificial Sequence
  Cyclic GFR-binding peptide
  MOD_RES (16)..(16): Xaa is C or S
VKAVKVSRLQVQTPRXQVNR

SEQ ID NO: 3848 - protein, 17 aa, Artificial Sequence
  Cyclic GFR-binding peptide
  MOD_RES (14)..(14): Xaa is C or S
IKRMQVPREETPVXELG

SEQ ID NO: 3849 - protein, 17 aa, Artificial Sequence
  Cyclic GFR-binding peptide
  MOD_RES (14)..(14): Xaa is C or S
MIQMTINSEETPVXELG

SEQ ID NO: 3850 - protein, 13 aa, Artificial Sequence
  Cyclic GFR-binding peptide
MIQVTINSLQVQT

SEQ ID NO: 3851 - protein, 19 aa, Artificial Sequence
  Cyclic GFR-binding peptide
  MOD_RES (14)..(14): Xaa is C or S
VKAMKVSREETPVXELGED

SEQ ID NO: 3852 - protein, 21 aa, Artificial Sequence
  Cyclic GFR-binding peptide
LKPKKRVYEMIQVTINSHHVR

SEQ ID NO: 3853 - protein, 17 aa, Artificial Sequence
  Cyclic GFR-binding peptide
LKPKKRVYEIKRVQVPR

SEQ ID NO: 3854 - protein, 20 aa, Artificial Sequence
  Cyclic GFR-binding peptide
HQGQHPKIRVKAMKVSREET

SEQ ID NO: 3855 - protein, 19 aa, Artificial Sequence
  Cyclic GFR-binding peptide
LKPKKRVYEVKAVKVSRHH

SEQ ID NO: 3856 - protein, 13 aa, Artificial Sequence
  Cyclic GFR-binding peptide
VKAMKVSREETPV

SEQ ID NO: 3857 - protein, 20 aa, Artificial Sequence
  Cyclic GFR-binding peptide
  MOD_RES (14)..(14): Xaa is C or S
VKAMKVSREETPVXELGEDN

SEQ ID NO: 3858 - protein, 17 aa, Artificial Sequence
  Cyclic GFR-binding peptide
HQGQHPKIRMIQMTINS

SEQ ID NO: 3859 - protein, 16 aa, Artificial Sequence
  Cyclic GFR-binding peptide
  MOD_RES (14)..(14): Xaa is C or S
IKRMQVPREETPVXEL

SEQ ID NO: 3860 - protein, 20 aa, Artificial Sequence
  Cyclic GFR-binding peptide
  MOD_RES (14)..(14): Xaa is C or S
MIQMTINSEETPVXELGEDN

SEQ ID NO: 3861 - protein, 21 aa, Artificial Sequence
  Cyclic GFR-binding peptide
LKPKKRVYEIKRVQVPRHHVR

SEQ ID NO: 3862 - protein, 17 aa, Artificial Sequence
  Cyclic GFR-binding peptide
LKPKKRVYEMIQVTINS

SEQ ID NO: 3863 - protein, 29 aa, Artificial Sequence
  Cyclic GFR-binding peptide
  MOD_RES (23)..(23): Xaa is C or S
HQGQHPKIRMIQMTINSEETPVXELGEDN

SEQ ID NO: 3864 - protein, 18 aa, Artificial Sequence
  Cyclic GFR-binding peptide
  MOD_RES (16)..(16): Xaa is C or S
VKAVKVSRLQVQTPRXQV

SEQ ID NO: 3865 - protein, 17 aa, Artificial Sequence
  Cyclic GFR-binding peptide
  MOD_RES (16)..(16): Xaa is C or S
MIQVTINSHHVRSPQXK

SEQ ID NO: 3866 - protein, 16 aa, Artificial Sequence
  Cyclic GFR-binding peptide
  MOD_RES (16)..(16): Xaa is C or S
MIQVTINSLQVQTPRX

SEQ ID NO: 3867 - protein, 29 aa, Artificial Sequence
  Cyclic GFR-binding peptide
  MOD_RES (25)..(25): Xaa is C or S
LKPKKRVYEVKAVKVSRHHVRSPQXKVSS

SEQ ID NO: 3868 - protein, 14 aa, Artificial Sequence
  Cyclic GFR-binding peptide
MIQVTINSHHVRSP

SEQ ID NO: 3869 - protein, 17 aa, Artificial Sequence
  Cyclic GFR-binding peptide
FIPKKRVIEVKAVKVSR

SEQ ID NO: 3870 - protein, 21 aa, Artificial Sequence
  Cyclic GFR-binding peptide
HQGQHPKIRIKRMQVPREETP

SEQ ID NO: 3871 - protein, 19 aa, Artificial Sequence
  Cyclic GFR-binding peptide
HQGQHPKIRMIQMTINSQG

SEQ ID NO: 3872 - protein, 20 aa, Artificial Sequence
  Cyclic GFR-binding peptide
LKPKKRVYEIKRVQVPRHHV

SEQ ID NO: 3873 - protein, 20 aa, Artificial Sequence
  Cyclic GFR-binding peptide
HQGQHPKIRVKAMKVSRQGT

SEQ ID NO: 3874 - protein, 17 aa, Artificial Sequence
  Cyclic GFR-binding peptide
HQGQHPKIRVKAMKVSR

SEQ ID NO: 3875 - protein, 15 aa, Artificial Sequence
  Cyclic GFR-binding peptide
  MOD_RES (14)..(14): Xaa is C or S
VKAMKVSRQGTPVXE

SEQ ID NO: 3876 - protein, 21 aa, Artificial Sequence
  Cyclic GFR-binding peptide
HQGQHPKIRVKAMKVSRQGTP

SEQ ID NO: 3877 - protein, 21 aa, Artificial Sequence
  Cyclic GFR-binding peptide
LKPKKRVYEVKAVKVSRHHVR

SEQ ID NO: 3878 - protein, 18 aa, Artificial Sequence
  Cyclic GFR-binding peptide
HQGQHPKIRIKRMQVPRQ

SEQ ID NO: 3879 - protein, 20 aa, Artificial Sequence
  Cyclic GFR-binding peptide
  MOD_RES (16)..(16): Xaa is C or S
IKRVQVPRHHVRSPQXKVSS

SEQ ID NO: 3880 - protein, 20 aa, Artificial Sequence
  Cyclic GFR-binding peptide
HQGQHPKIRIKRMQVPREET

SEQ ID NO: 3881 - protein, 16 aa, Artificial Sequence
  Cyclic GFR-binding peptide
  MOD_RES (14)..(14): Xaa is C or S
MIQMTINSEETPVXEL

SEQ ID NO: 3882 - protein, 15 aa, Artificial Sequence
  Cyclic GFR-binding peptide
  MOD_RES (14)..(14): Xaa is C or S
VKAMKVSREETPVXE

SEQ ID NO: 3883 - protein, 14 aa, Artificial Sequence
  Cyclic GFR-binding peptide
  MOD_RES (14)..(14): Xaa is C or S
IKRMQVPREETPVX

SEQ ID NO: 3884 - protein, 19 aa, Artificial Sequence
  Cyclic GFR-binding peptide
  MOD_RES (14)..(14): Xaa is C or S
VKAMKVSRQGTPVXELGED

SEQ ID NO: 3885 - protein, 19 aa, Artificial Sequence
  Cyclic GFR-binding peptide
FIPKKRVIEMIQVTINSLQ

SEQ ID NO: 3886 - protein, 13 aa, Artificial Sequence
  Cyclic GFR-binding peptide
MIQVTINSHHVRS

SEQ ID NO: 3887 - protein, 14 aa, Artificial Sequence
  Cyclic GFR-binding peptide
  MOD_RES (14)..(14): Xaa is C or S
MIQMTINSEETPVX

SEQ ID NO: 3888 - protein, 15 aa, Artificial Sequence
  Cyclic GFR-binding peptide
MIQVTINSHHVRSPQ

SEQ ID NO: 3889 - protein, 18 aa, Artificial Sequence
  Cyclic GFR-binding peptide
HQGQHPKIRMIQMTINSE

SEQ ID NO: 3890 - protein, 14 aa, Artificial Sequence
  Cyclic GFR-binding peptide
  MOD_RES (14)..(14): Xaa is C or S
MIQMTINSQGTPVX

SEQ ID NO: 3891 - protein, 19 aa, Artificial Sequence
  Cyclic GFR-binding peptide
HQGQHPKIRIKRMQVPRQG

SEQ ID NO: 3892 - protein, 18 aa, Artificial Sequence
  Cyclic GFR-binding peptide
LKPKKRVYEVKAVKVSRH

SEQ ID NO: 3893 - protein, 20 aa, Artificial Sequence
  Cyclic GFR-binding peptide
  MOD_RES (16)..(16): Xaa is C or S
MIQVTINSHHVRSPQXKVSS

SEQ ID NO: 3894 - protein, 21 aa, Artificial Sequence
  Cyclic GFR-binding peptide
FIPKKRVIEVKAVKVSRLQVQ

SEQ ID NO: 3895 - protein, 20 aa, Artificial Sequence
  Cyclic GFR-binding peptide
LKPKKRVYEMIQVTINSHHV

SEQ ID NO: 3896 - protein, 18 aa, Artificial Sequence
  Cyclic GFR-binding peptide
FIPKKRVIEMIQVTINSL

SEQ ID NO: 3897 - protein, 19 aa, Artificial Sequence
  Cyclic GFR-binding peptide
  MOD_RES (16)..(16): Xaa is C or S
VKAVKVSRLQVQTPRXQVN

SEQ ID NO: 3898 - protein, 14 aa, Artificial Sequence
  Cyclic GFR-binding peptide
  MOD_RES (14)..(14): Xaa is C or S
VKAMKVSRQGTPVX

SEQ ID NO: 3899 - protein, 20 aa, Artificial Sequence
  Cyclic GFR-binding peptide
  MOD_RES (14)..(14): Xaa is C or S
MIQMTINSQGTPVXELGEDN

SEQ ID NO: 3900 - protein, 19 aa, Artificial Sequence
  Cyclic GFR-binding peptide
  MOD_RES (14)..(14): Xaa is C or S
IKRMQVPREETPVXELGED

SEQ ID NO: 3901 - protein, 21 aa, Artificial Sequence
  Cyclic GFR-binding peptide
HQGQHPKIRMIQMTINSEETP

SEQ ID NO: 3902 - protein, 21 aa, Artificial Sequence
  Cyclic GFR-binding peptide
HQGQHPKIRIKRMQVPRQGTP

SEQ ID NO: 3903 - protein, 18 aa, Artificial Sequence
  Cyclic GFR-binding peptide
  MOD_RES (14)..(14): Xaa is C or S
MIQMTINSQGTPVXELGE

SEQ ID NO: 3904 - protein, 29 aa, Artificial Sequence
  Cyclic GFR-binding peptide
  MOD_RES (25)..(25): Xaa is C or S
FIPKKRVIEMIQVTINSLQVQTPRXQVNR

SEQ ID NO: 3905 - protein, 16 aa, Artificial Sequence
  Cyclic GFR-binding peptide
  MOD_RES (14)..(14): Xaa is C or S
IKRMQVPRQGTPVXEL

SEQ ID NO: 3906 - protein, 13 aa, Artificial Sequence
  Cyclic GFR-binding peptide
IKRMQVPREETPV

SEQ ID NO: 3907 - protein, 18 aa, Artificial Sequence
  Cyclic GFR-binding peptide
  MOD_RES (16)..(16): Xaa is C or S
MIQVTINSHHVRSPQXKV

SEQ ID NO: 3908 - protein, 14 aa, Artificial Sequence
  Cyclic GFR-binding peptide
MIQVTINSLQVQTP

SEQ ID NO: 3909 - protein, 21 aa, Artificial Sequence
  Cyclic GFR-binding peptide
HQGQHPKIRVKAMKVSREETP

SEQ ID NO: 3910 - protein, 13 aa, Artificial Sequence
  Cyclic GFR-binding peptide
VKAMKVSRQGTPV

SEQ ID NO: 3911 - protein, 18 aa, Artificial Sequence
  Cyclic GFR-binding peptide
  MOD_RES (14)..(14): Xaa is C or S
VKAMKVSRQGTPVXELGE

SEQ ID NO: 3912 - protein, 16 aa, Artificial Sequence
  Cyclic GFR-binding peptide
  MOD_RES (16)..(16): Xaa is C or S
VKAVKVSRLQVQTPRX

SEQ ID NO: 3913 - protein, 18 aa, Artificial Sequence
  Cyclic GFR-binding peptide
HQGQHPKIRVKAMKVSRQ

SEQ ID NO: 3914 - protein, 14 aa, Artificial Sequence
  Cyclic GFR-binding peptide
VKAVKVSRLQVQTP

SEQ ID NO: 3915 - protein, 13 aa, Artificial Sequence
  Cyclic GFR-binding peptide
IKRVQVPRHHVRS

SEQ ID NO: 3916 - protein, 20 aa, Artificial Sequence
  Cyclic GFR-binding peptide
FIPKKRVIEVKAVKVSRLQV

SEQ ID NO: 3917 - protein, 29 aa, Artificial Sequence
  Cyclic GFR-binding peptide
  MOD_RES (23)..(23): Xaa is C or S
HQGQHPKIRIKRMQVPREETPVXELGEDN

SEQ ID NO: 3918 - protein, 20 aa, Artificial Sequence
  Cyclic GFR-binding peptide
FIPKKRVIEIKRVQVPRLQV

SEQ ID NO: 3919 - protein, 29 aa, Artificial Sequence
  Cyclic GFR-binding peptide
  MOD_RES (25)..(25): Xaa is C or S
FIPKKRVIEVKAVKVSRLQVQTPRXQVNR

SEQ ID NO: 3920 - protein, 17 aa, Artificial Sequence
  Cyclic GFR-binding peptide
  MOD_RES (14)..(14): Xaa is C or S
MIQMTINSQGTPVXELG

SEQ ID NO: 3921 - protein, 29 aa, Artificial Sequence
  Cyclic GFR-binding peptide
  MOD_RES (25)..(25): Xaa is C or S
FIPKKRVIEIKRVQVPRLQVQTPRXQVNR

SEQ ID NO: 3922 - protein, 20 aa, Artificial Sequence
  Cyclic GFR-binding peptide
  MOD_RES (14)..(14): Xaa is C or S
VKAMKVSRQGTPVXELGEDN

SEQ ID NO: 3923 - protein, 16 aa, Artificial Sequence
  Cyclic GFR-binding peptide
  MOD_RES (14)..(14): Xaa is C or S
MIQMTINSQGTPVXEL

SEQ ID NO: 3924 - protein, 17 aa, Artificial Sequence
  Cyclic GFR-binding peptide
  MOD_RES (16)..(16): Xaa is C or S
MIQVTINSLQVQTPRXQ

SEQ ID NO: 3925 - protein, 17 aa, Artificial Sequence
  Cyclic GFR-binding peptide
  MOD_RES (14)..(14): Xaa is C or S
VKAMKVSRQGTPVXELG

SEQ ID NO: 3926 - protein, 18 aa, Artificial Sequence
  Cyclic GFR-binding peptide
  MOD_RES (14)..(14): Xaa is C or S
IKRMQVPREETPVXELGE

SEQ ID NO: 3927 - protein, 20 aa, Artificial Sequence
  Cyclic GFR-binding peptide
FIPKKRVIEMIQVTINSLQV

SEQ ID NO: 3928 - protein, 18 aa, Artificial Sequence
  Cyclic GFR-binding peptide
HQGQHPKIRMIQMTINSQ

SEQ ID NO: 3929 - protein, 13 aa, Artificial Sequence
  Cyclic GFR-binding peptide
MIQMTINSEETPV

SEQ ID NO: 3930 - protein, 18 aa, Artificial Sequence
  Cyclic GFR-binding peptide
HQGQHPKIRVKAMKVSRE

SEQ ID NO: 3931 - protein, 13 aa, Artificial Sequence
  Cyclic GFR-binding peptide
MIQMTINSQGTPV

SEQ ID NO: 3932 - protein, 19 aa, Artificial Sequence
  Cyclic GFR-binding peptide
  MOD_RES (14)..(14): Xaa is C or S
MIQMTINSQGTPVXELGED

SEQ ID NO: 3933 - protein, 18 aa, Artificial Sequence
  Cyclic GFR-binding peptide
  MOD_RES (16)..(16): Xaa is C or S
IKRVQVPRHHVRSPQXKV

SEQ ID NO: 3934 - protein, 18 aa, Artificial Sequence
  Cyclic GFR-binding peptide
  MOD_RES (14)..(14): Xaa is C or S
IKRMQVPRQGTPVXELGE

SEQ ID NO: 3935 - protein, 20 aa, Artificial Sequence
  Cyclic GFR-binding peptide
  MOD_RES (14)..(14): Xaa is C or S
IKRMQVPRQGTPVXELGEDN

SEQ ID NO: 3936 - protein, 17 aa, Artificial Sequence
  Cyclic GFR-binding peptide
  MOD_RES (16)..(16): Xaa is C or S
VKAVKVSRLQVQTPRXQ

SEQ ID NO: 3937 - protein, 20 aa, Artificial Sequence
  Cyclic GFR-binding peptide
HQGQHPKIRMIQMTINSQGT

SEQ ID NO: 3938 - protein, 29 aa, Artificial Sequence
  Cyclic GFR-binding peptide
  MOD_RES (23)..(23): Xaa is C or S
HQGQHPKIRIKRMQVPRQGTPVXELGEDN

SEQ ID NO: 3939 - protein, 17 aa, Artificial Sequence
  Cyclic GFR-binding peptide
  MOD_RES (16)..(16): Xaa is C or S
IKRVQVPRHHVRSPQXK

SEQ ID NO: 3940 - protein, 21 aa, Artificial Sequence
  Cyclic GFR-binding peptide
HQGQHPKIRMIQMTINSQGTP

SEQ ID NO: 3941 - protein, 15 aa, Artificial Sequence
  Cyclic GFR-binding peptide
  MOD_RES (14)..(14): Xaa is C or S
IKRMQVPRQGTPVXE

SEQ ID NO: 3942 - protein, 20 aa, Artificial Sequence
  Cyclic GFR-binding peptide
  MOD_RES (14)..(14): Xaa is C or S
IKRMQVPREETPVXELGEDN

SEQ ID NO: 3943 - protein, 17 aa, Artificial Sequence
  Cyclic GFR-binding peptide
  MOD_RES (14)..(14): Xaa is C or S
VKAMKVSREETPVXELG

SEQ ID NO: 3944 - protein, 19 aa, Artificial Sequence
  Cyclic GFR-binding peptide
LKPKKRVYEIKRVQVPRHH

SEQ ID NO: 3945 - protein, 19 aa, Artificial Sequence
  Cyclic GFR-binding peptide
  MOD_RES (14)..(14): Xaa is C or S
MIQMTINSEETPVXELGED

SEQ ID NO: 3946 - protein, 17 aa, Artificial Sequence
  Cyclic GFR-binding peptide
  MOD_RES (14)..(14): Xaa is C or S
IKRMQVPRQGTPVXELG

SEQ ID NO: 3947 - protein, 19 aa, Artificial Sequence
  Cyclic GFR-binding peptide
  MOD_RES (16)..(16): Xaa is C or S
MIQVTINSHHVRSPQXKVS

SEQ ID NO: 3948 - protein, 19 aa, Artificial Sequence
  Cyclic GFR-binding peptide
HQGQHPKIRVKAMKVSREE

SEQ ID NO: 3949 - protein, 16 aa, Artificial Sequence
  Cyclic GFR-binding peptide
  MOD_RES (14)..(14): Xaa is C or S
VKAMKVSREETPVXEL

SEQ ID NO: 3950 - protein, 18 aa, Artificial Sequence
  Cyclic GFR-binding peptide
  MOD_RES (14)..(14): Xaa is C or S
VKAMKVSREETPVXELGE

SEQ ID NO: 3951 - protein, 16 aa, Artificial Sequence
  Cyclic GFR-binding peptide
  MOD_RES (16)..(16): Xaa is C or S
IKRVQVPRHHVRSPQX

SEQ ID NO: 3952 - protein, 19 aa, Artificial Sequence
  Cyclic GFR-binding peptide
HQGQHPKIRVKAMKVSRQG

SEQ ID NO: 3953 - protein, 19 aa, Artificial Sequence
  Cyclic GFR-binding peptide
  MOD_RES (16)..(16): Xaa is C or S
MIQVTINSLQVQTPRXQVN

SEQ ID NO: 3954 - protein, 16 aa, Artificial Sequence
  Cyclic GFR-binding peptide
  MOD_RES (16)..(16): Xaa is C or S
MIQVTINSHHVRSPQX

SEQ ID NO: 3955 - protein, 29 aa, Artificial Sequence
  Cyclic GFR-binding peptide
  MOD_RES (25)..(25): Xaa is C or S
LKPKKRVYEMIQVTINSHHVRSPQXKVSS

SEQ ID NO: 3956 - protein, 18 aa, Artificial Sequence
  Cyclic GFR-binding peptide
LKPKKRVYEIKRVQVPRH

SEQ ID NO: 3957 - protein, 15 aa, Artificial Sequence
  Cyclic GFR-binding peptide
  MOD_RES (14)..(14): Xaa is C or S
MIQMTINSQGTPVXE

SEQ ID NO: 3958 - protein, 15 aa, Artificial Sequence
  Cyclic GFR-binding peptide
  MOD_RES (14)..(14): Xaa is C or S
IKRMQVPREETPVXE

SEQ ID NO: 3959 - protein, 21 aa, Artificial Sequence
  Cyclic GFR-binding peptide
FIPKKRVIEMIQVTINSLQVQ

SEQ ID NO: 3960 - protein, 18 aa, Artificial Sequence
  Cyclic GFR-binding peptide
FIPKKRVIEVKAVKVSRL

SEQ ID NO: 3961 - protein, 20 aa, Artificial Sequence
  Cyclic GFR-binding peptide
LKPKKRVYEVKAVKVSRHHV

SEQ ID NO: 3962 - protein, 18 aa, Artificial Sequence
  Cyclic GFR-binding peptide
LKPKKRVYEMIQVTINSH

SEQ ID NO: 3963 - protein, 17 aa, Artificial Sequence
  Cyclic GFR-binding peptide
FIPKKRVIEMIQVTINS

SEQ ID NO: 3964 - protein, 29 aa, Artificial Sequence
  Cyclic GFR-binding peptide
  MOD_RES (25)..(25): Xaa is C or S
LKPKKRVYEIKRVQVPRHHVRSPQXKVSS

SEQ ID NO: 3965 - protein, 19 aa, Artificial Sequence
  Cyclic GFR-binding peptide
FIPKKRVIEVKAVKVSRLQ

SEQ ID NO: 3966 - protein, 13 aa, Artificial Sequence
  Cyclic GFR-binding peptide
TQVQLRSVKVAKV

SEQ ID NO: 3967 - protein, 20 aa, Artificial Sequence
  Cyclic GFR-binding peptide
TGQRPVQMRKIRIKPHQGQH

SEQ ID NO: 3968 - protein, 13 aa, Artificial Sequence
  Cyclic GFR-binding peptide
VPTGQRPVQMRKI

SEQ ID NO: 3969 - protein, 18 aa, Artificial Sequence
  Cyclic GFR-binding peptide
  MOD_RES (3)..(3): Xaa is C or S
VQXRPTQVQLSNITVQIM

SEQ ID NO: 3970 - protein, 19 aa, Artificial Sequence
  Cyclic GFR-binding peptide
HHSNITVQIMEYVRKKPKL

SEQ ID NO: 3971 - protein, 14 aa, Artificial Sequence
  Cyclic GFR-binding peptide
PSRVHHRPVQVRKI

SEQ ID NO: 3972 - protein, 17 aa, Artificial Sequence
  Cyclic GFR-binding peptide
RPVQMRKIRIKPHQGQH

SEQ ID NO: 3973 - protein, 19 aa, Artificial Sequence
  Cyclic GFR-binding peptide
  MOD_RES (6)..(6): Xaa is C or S
DEGLEXVPTGQRPVQMRKI

SEQ ID NO: 3974 - protein, 14 aa, Artificial Sequence
  Cyclic GFR-binding peptide
  MOD_RES (1)..(1): Xaa is C or S
XVPTEERSVKMAKV

SEQ ID NO: 3975 - protein, 18 aa, Artificial Sequence
  Cyclic GFR-binding peptide
ERPVQMRKIRIKPHQGQH

SEQ ID NO: 3976 - protein, 29 aa, Artificial Sequence
  Cyclic GFR-binding peptide
  MOD_RES (7)..(7): Xaa is C or S
NDEGLEXVPTGQRSVKMAKVRIKPHQGQH

SEQ ID NO: 3977 - protein, 15 aa, Artificial Sequence
  Cyclic GFR-binding peptide
RPTQVQLSNITVQIM

SEQ ID NO: 3978 - protein, 15 aa, Artificial Sequence
  Cyclic GFR-binding peptide
RPTQVQLRSVKVAKV

SEQ ID NO: 3979 - protein, 20 aa, Artificial Sequence
  Cyclic GFR-binding peptide
  MOD_RES (5)..(5): Xaa is C or S
RNVQXRPTQVQLSNITVQIM

SEQ ID NO: 3980 - protein, 15 aa, Artificial Sequence
  Cyclic GFR-binding peptide
QPSRVHHRPVQVRKI

SEQ ID NO: 3981 - protein, 14 aa, Artificial Sequence
  Cyclic GFR-binding peptide
  MOD_RES (1)..(1): Xaa is C or S
XVPTGQRPVQMRKI

SEQ ID NO: 3982 - protein, 16 aa, Artificial Sequence
  Cyclic GFR-binding peptide
  MOD_RES (3)..(3): Xaa is C or S
LEXVPTGQRSVKMAKV

SEQ ID NO: 3983 - protein, 19 aa, Artificial Sequence
  Cyclic GFR-binding peptide
  MOD_RES (4)..(4): Xaa is C or S
SVKXQPSRVHHRPVQVRKI

SEQ ID NO: 3984 - protein, 29 aa, Artificial Sequence
  Cyclic GFR-binding peptide
  MOD_RES (7)..(7): Xaa is C or S
NDEGLEXVPTEERSVKMAKVRIKPHQGQH

SEQ ID NO: 3985 - protein, 19 aa, Artificial Sequence
  Cyclic GFR-binding peptide
EERPVQMRKIRIKPHQGQH

SEQ ID NO: 3986 - protein, 20 aa, Artificial Sequence
  Cyclic GFR-binding peptide
  MOD_RES (5)..(5): Xaa is C or S
RNVQXRPTQVQLRSVKVAKV

SEQ ID NO: 3987 - protein, 17 aa, Artificial Sequence
  Cyclic GFR-binding peptide
  MOD_RES (4)..(4): Xaa is C or S
GLEXVPTEERPVQMRKI

SEQ ID NO: 3988 - protein, 13 aa, Artificial Sequence
  Cyclic GFR-binding peptide
TQVQLSNITVQIM

SEQ ID NO: 3989 - protein, 19 aa, Artificial Sequence
  Cyclic GFR-binding peptide
  MOD_RES (6)..(6): Xaa is C or S
DEGLEXVPTEERSVKMAKV

SEQ ID NO: 3990 - protein, 21 aa, Artificial Sequence
  Cyclic GFR-binding peptide
RVHHSNITVQIMEYVRKKPKL

SEQ ID NO: 3991 - protein, 17 aa, Artificial Sequence
  Cyclic GFR-binding peptide
RPVQVRKIEYVRKKPKL

SEQ ID NO: 3992 - protein, 20 aa, Artificial Sequence
  Cyclic GFR-binding peptide
TEERSVKMAKVRIKPHQGQH

SEQ ID NO: 3993 - protein, 13 aa, Artificial Sequence
  Cyclic GFR-binding peptide
VPTEERSVKMAKV

SEQ ID NO: 3994 - protein, 20 aa, Artificial Sequence
  Cyclic GFR-binding peptide
  MOD_RES (7)..(7): Xaa is C or S
NDEGLEXVPTEERSVKMAKV

SEQ ID NO: 3995 - protein, 16 aa, Artificial Sequence
  Cyclic GFR-binding peptide
  MOD_RES (3)..(3): Xaa is C or S
LEXVPTEERPVQMRKI

SEQ ID NO: 3996 - protein, 21 aa, Artificial Sequence
  Cyclic GFR-binding peptide
RVHHRPVQVRKIEYVRKKPKL

SEQ ID NO: 3997 - protein, 17 aa, Artificial Sequence
  Cyclic GFR-binding peptide
SNITVQIMEYVRKKPKL

SEQ ID NO: 3998 - protein, 18 aa, Artificial Sequence
  Cyclic GFR-binding peptide
  MOD_RES (3)..(3): Xaa is C or S
VQXRPTQVQLRSVKVAKV

SEQ ID NO: 3999 - protein, 17 aa, Artificial Sequence
  Cyclic GFR-binding peptide
  MOD_RES (2)..(2): Xaa is C or S
KXQPSRVHHSNITVQIM

SEQ ID NO: 4000 - protein, 16 aa, Artificial Sequence
  Cyclic GFR-binding peptide
  MOD_RES (1)..(1): Xaa is C or S
XRPTQVQLSNITVQIM

SEQ ID NO: 4001 - protein, 14 aa, Artificial Sequence
  Cyclic GFR-binding peptide
PSRVHHSNITVQIM

SEQ ID NO: 4002 - protein, 17 aa, Artificial Sequence
  Cyclic GFR-binding peptide
RSVKVAKVEIVRKKPIF

SEQ ID NO: 4003 - protein, 21 aa, Artificial Sequence
  Cyclic GFR-binding peptide
PTEERPVQMRKIRIKPHQGQH

SEQ ID NO: 4004 - protein, 20 aa, Artificial Sequence
  Cyclic GFR-binding peptide
VHHRPVQVRKIEYVRKKPKL

SEQ ID NO: 4005 - protein, 20 aa, Artificial Sequence
  Cyclic GFR-binding peptide
TGQRSVKMAKVRIKPHQGQH

SEQ ID NO: 4006 - protein, 17 aa, Artificial Sequence
  Cyclic GFR-binding peptide
RSVKMAKVRIKPHQGQH

SEQ ID NO: 4007 - protein, 15 aa, Artificial Sequence
  Cyclic GFR-binding peptide
  MOD_RES (2)..(2): Xaa is C or S
EXVPTGQRSVKMAKV

SEQ ID NO: 4008 - protein, 21 aa, Artificial Sequence
  Cyclic GFR-binding peptide
PTGQRSVKMAKVRIKPHQGQH

SEQ ID NO: 4009 - protein, 18 aa, Artificial Sequence
  Cyclic GFR-binding peptide
QRPVQMRKIRIKPHQGQH

SEQ ID NO: 4010 - protein, 20 aa, Artificial Sequence
  Cyclic GFR-binding peptide
  MOD_RES (5)..(5): Xaa is C or S
SSVKXQPSRVHHRPVQVRKI

SEQ ID NO: 4011 - protein, 20 aa, Artificial Sequence
  Cyclic GFR-binding peptide
TEERPVQMRKIRIKPHQGQH

SEQ ID NO: 4012 - protein, 15 aa, Artificial Sequence
  Cyclic GFR-binding peptide
  MOD_RES (2)..(2): Xaa is C or S
EXVPTEERSVKMAKV

SEQ ID NO: 4013 - protein, 14 aa, Artificial Sequence
  Cyclic GFR-binding peptide
  MOD_RES (1)..(1): Xaa is C or S
XVPTEERPVQMRKI

SEQ ID NO: 4014 - protein, 19 aa, Artificial Sequence
  Cyclic GFR-binding peptide
  MOD_RES (6)..(6): Xaa is C or S
DEGLEXVPTGQRSVKMAKV

SEQ ID NO: 4015 - protein, 19 aa, Artificial Sequence
  Cyclic GFR-binding peptide
QLSNITVQIMEIVRKKPIF

SEQ ID NO: 4016 - protein, 13 aa, Artificial Sequence
  Cyclic GFR-binding peptide
SRVHHSNITVQIM

SEQ ID NO: 4017 - protein, 15 aa, Artificial Sequence
  Cyclic GFR-binding peptide
QPSRVHHSNITVQIM

SEQ ID NO: 4018 - protein, 19 aa, Artificial Sequence
  Cyclic GFR-binding peptide
GQRPVQMRKIRIKPHQGQH

SEQ ID NO: 4019 - protein, 20 aa, Artificial Sequence
  Cyclic GFR-binding peptide
  MOD_RES (5)..(5): Xaa is C or S
SSVKXQPSRVHHSNITVQIM

SEQ ID NO: 4020 - protein, 21 aa, Artificial Sequence
  Cyclic GFR-binding peptide
QVQLRSVKVAKVEIVRKKPIF

SEQ ID NO: 4021 - protein, 20 aa, Artificial Sequence
  Cyclic GFR-binding peptide
VHHSNITVQIMEYVRKKPKL

SEQ ID NO: 4022 - protein, 18 aa, Artificial Sequence
  Cyclic GFR-binding peptide
LSNITVQIMEIVRKKPIF

SEQ ID NO: 4023 - protein, 19 aa, Artificial Sequence
  Cyclic GFR-binding peptide
  MOD_RES (4)..(4): Xaa is C or S
NVQXRPTQVQLRSVKVAKV

SEQ ID NO: 4024 - protein, 14 aa, Artificial Sequence
  Cyclic GFR-binding peptide
  MOD_RES (1)..(1): Xaa is C or S
XVPTGQRSVKMAKV

SEQ ID NO: 4025 - protein, 19 aa, Artificial Sequence
  Cyclic GFR-binding peptide
  MOD_RES (6)..(6): Xaa is C or S
DEGLEXVPTEERPVQMRKI

SEQ ID NO: 4026 - protein, 21 aa, Artificial Sequence
  Cyclic GFR-binding peptide
PTGQRPVQMRKIRIKPHQGQH

SEQ ID NO: 4027 - protein, 29 aa, Artificial Sequence
  Cyclic GFR-binding peptide
  MOD_RES (5)..(5): Xaa is C or S
RNVQXRPTQVQLSNITVQIMEIVRKKPIF

SEQ ID NO: 4028 - protein, 16 aa, Artificial Sequence
  Cyclic GFR-binding peptide
  MOD_RES (3)..(3): Xaa is C or S
LEXVPTGQRPVQMRKI

SEQ ID NO: 4029 - protein, 13 aa, Artificial Sequence
  Cyclic GFR-binding peptide
VPTEERPVQMRKI

SEQ ID NO: 4030 - protein, 18 aa, Artificial Sequence
  Cyclic GFR-binding peptide
  MOD_RES (3)..(3): Xaa is C or S
VKXQPSRVHHSNITVQIM

SEQ ID NO: 4031 - protein, 14 aa, Artificial Sequence
  Cyclic GFR-binding peptide
PTQVQLSNITVQIM

SEQ ID NO: 4032 - protein, 21 aa, Artificial Sequence
  Cyclic GFR-binding peptide
PTEERSVKMAKVRIKPHQGQH

SEQ ID NO: 4033 - protein, 13 aa, Artificial Sequence
  Cyclic GFR-binding peptide
VPTGQRSVKMAKV

SEQ ID NO: 4034 - protein, 18 aa, Artificial Sequence
  Cyclic GFR-binding peptide
  MOD_RES (5)..(5): Xaa is C or S
EGLEXVPTGQRSVKMAKV

SEQ ID NO: 4035 - protein, 16 aa, Artificial Sequence
  Cyclic GFR-binding peptide
  MOD_RES (1)..(1): Xaa is C or S
XRPTQVQLRSVKVAKV

SEQ ID NO: 4036 - protein, 18 aa, Artificial Sequence
  Cyclic GFR-binding peptide
QRSVKMAKVRIKPHQGQH

SEQ ID NO: 4037 - protein, 14 aa, Artificial Sequence
  Cyclic GFR-binding peptide
PTQVQLRSVKVAKV

SEQ ID NO: 4038 - protein, 13 aa, Artificial Sequence
  Cyclic GFR-binding peptide
SRVHHRPVQVRKI

SEQ ID NO: 4039 - protein, 20 aa, Artificial Sequence
  Cyclic GFR-binding peptide
VQLRSVKVAKVEIVRKKPIF

SEQ ID NO: 4040 - protein, 29 aa, Artificial Sequence
  Cyclic GFR-binding peptide
  MOD_RES (7)..(7): Xaa is C or S
NDEGLEXVPTEERPVQMRKIRIKPHQGQH

SEQ ID NO: 4041 - protein, 29 aa, Artificial Sequence
  Cyclic GFR-binding peptide
  MOD_RES (5)..(5): Xaa is C or S
RNVQXRPTQVQLRSVKVAKVEIVRKKPIF

SEQ ID NO: 4042 - protein, 20 aa, Artificial Sequence
  Cyclic GFR-binding peptide
  MOD_RES (7)..(7): Xaa is C or S
NDEGLEXVPTGQRSVKMAKV

SEQ ID NO: 4043 - protein, 17 aa, Artificial Sequence
  Cyclic GFR-binding peptide
  MOD_RES (2)..(2): Xaa is C or S
QXRPTQVQLSNITVQIM

SEQ ID NO: 4044 - protein, 17 aa, Artificial Sequence
  Cyclic GFR-binding peptide
  MOD_RES (4)..(4): Xaa is C or S
GLEXVPTGQRSVKMAKV

SEQ ID NO: 4045 - protein, 18 aa, Artificial Sequence
  Cyclic GFR-binding peptide
  MOD_RES (5)..(5): Xaa is C or S
EGLEXVPTEERPVQMRKI

SEQ ID NO: 4046 - protein, 20 aa, Artificial Sequence
  Cyclic GFR-binding peptide
VQLSNITVQIMEIVRKKPIF

SEQ ID NO: 4047 - protein, 18 aa, Artificial Sequence
  Cyclic GFR-binding peptide
ERSVKMAKVRIKPHQGQH

SEQ ID NO: 4048 - protein, 18 aa, Artificial Sequence
  Cyclic GFR-binding peptide
  MOD_RES (3)..(3): Xaa is C or S
VKXQPSRVHHRPVQVRKI

SEQ ID NO: 4049 - protein, 18 aa, Artificial Sequence
  Cyclic GFR-binding peptide
  MOD_RES (5)..(5): Xaa is C or S
EGLEXVPTGQRPVQMRKI

SEQ ID NO: 4050 - protein, 20 aa, Artificial Sequence
  Cyclic GFR-binding peptide
  MOD_RES (7)..(7): Xaa is C or S
NDEGLEXVPTGQRPVQMRKI

SEQ ID NO: 4051 - protein, 17 aa, Artificial Sequence
  Cyclic GFR-binding peptide
  MOD_RES (2)..(2): Xaa is C or S
QXRPTQVQLRSVKVAKV

SEQ ID NO: 4052 - protein, 29 aa, Artificial Sequence
  Cyclic GFR-binding peptide
  MOD_RES (7)..(7): Xaa is C or S
NDEGLEXVPTGQRPVQMRKIRIKPHQGQH

SEQ ID NO: 4053 - protein, 17 aa, Artificial Sequence
  Cyclic GFR-binding peptide
  MOD_RES (2)..(2): Xaa is C or S
KXQPSRVHHRPVQVRKI

SEQ ID NO: 4054 - protein, 15 aa, Artificial Sequence
  Cyclic GFR-binding peptide
  MOD_RES (2)..(2): Xaa is C or S
EXVPTGQRPVQMRKI

SEQ ID NO: 4055 - protein, 20 aa, Artificial Sequence
  Cyclic GFR-binding peptide
  MOD_RES (7)..(7): Xaa is C or S
NDEGLEXVPTEERPVQMRKI

SEQ ID NO: 4056 - protein, 17 aa, Artificial Sequence
  Cyclic GFR-binding peptide
  MOD_RES (4)..(4): Xaa is C or S
GLEXVPTEERSVKMAKV

SEQ ID NO: 4057 - protein, 19 aa, Artificial Sequence
  Cyclic GFR-binding peptide
HHRPVQVRKIEYVRKKPKL

SEQ ID NO: 4058 - protein, 17 aa, Artificial Sequence
  Cyclic GFR-binding peptide
  MOD_RES (4)..(4): Xaa is C or S
GLEXVPTGQRPVQMRKI

SEQ ID NO: 4059 - protein, 19 aa, Artificial Sequence
  Cyclic GFR-binding peptide
  MOD_RES (4)..(4): Xaa is C or S
SVKXQPSRVHHSNITVQIM

SEQ ID NO: 4060 - protein, 19 aa, Artificial Sequence
  Cyclic GFR-binding peptide
EERSVKMAKVRIKPHQGQH

SEQ ID NO: 4061 - protein, 16 aa, Artificial Sequence
  Cyclic GFR-binding peptide
  MOD_RES (3)..(3): Xaa is C or S
LEXVPTEERSVKMAKV

SEQ ID NO: 4062 - protein, 18 aa, Artificial Sequence
  Cyclic GFR-binding peptide
  MOD_RES (5)..(5): Xaa is C or S
EGLEXVPTEERSVKMAKV

SEQ ID NO: 4063 - protein, 16 aa, Artificial Sequence
  Cyclic GFR-binding peptide
  MOD_RES (1)..(1): Xaa is C or S
XQPSRVHHRPVQVRKI

SEQ ID NO: 4064 - protein, 19 aa, Artificial Sequence
  Cyclic GFR-binding peptide
GQRSVKMAKVRIKPHQGQH

SEQ ID NO: 4065 - protein, 19 aa, Artificial Sequence
  Cyclic GFR-binding peptide
  MOD_RES (4)..(4): Xaa is C or S
NVQXRPTQVQLSNITVQIM

SEQ ID NO: 4066 - protein, 16 aa, Artificial Sequence
  Cyclic GFR-binding peptide
  MOD_RES (1)..(1): Xaa is C or S
XQPSRVHHSNITVQIM

SEQ ID NO: 4067 - protein, 29 aa, Artificial Sequence
  Cyclic GFR-binding peptide
  MOD_RES (5)..(5): Xaa is C or S
SSVKXQPSRVHHSNITVQIMEYVRKKPKL

SEQ ID NO: 4068 - protein, 18 aa, Artificial Sequence
  Cyclic GFR-binding peptide
HRPVQVRKIEYVRKKPKL

SEQ ID NO: 4069 - protein, 15 aa, Artificial Sequence
  Cyclic GFR-binding peptide
  MOD_RES (2)..(2): Xaa is C or S
EXVPTEERPVQMRKI

SEQ ID NO: 4070 - protein, 21 aa, Artificial Sequence
  Cyclic GFR-binding peptide
QVQLSNITVQIMEIVRKKPIF

SEQ ID NO: 4071 - protein, 18 aa, Artificial Sequence
  Cyclic GFR-binding peptide
LRSVKVAKVEIVRKKPIF

SEQ ID NO: 4072 - protein, 18 aa, Artificial Sequence
  Cyclic GFR-binding peptide
HSNITVQIMEYVRKKPKL

SEQ ID NO: 4073 - protein, 17 aa, Artificial Sequence
  Cyclic GFR-binding peptide
SNITVQIMEIVRKKPIF

SEQ ID NO: 4074 - protein, 29 aa, Artificial Sequence
  Cyclic GFR-binding peptide
  MOD_RES (5)..(5): Xaa is C or S
SSVKXQPSRVHHRPVQVRKIEYVRKKPKL

SEQ ID NO: 4075 - protein, 19 aa, Artificial Sequence
  Cyclic GFR-binding peptide
QLRSVKVAKVEIVRKKPIF

SEQ ID NO: 4076 - protein, 15 aa, Artificial Sequence
  Cyclic GFR-binding peptide
IKPTKGIFYLISIAN

SEQ ID NO: 4077 - protein, 18 aa, Artificial Sequence
  Cyclic GFR-binding peptide
  MOD_RES (14)..(15): Xaa is C or S
KYLMSIPSLETPVXXAKP

SEQ ID NO: 4078 - protein, 15 aa, Artificial Sequence
  Cyclic GFR-binding peptide
IVNSSDDKYLVSIPS

SEQ ID NO: 4079 - protein, 27 aa, Artificial Sequence
  Cyclic GFR-binding peptide
  MOD_RES (21)..(22): Xaa is C or S
TPVGMDDFYLVSIANLKTPVXXAKGVK

SEQ ID NO: 4080 - protein, 18 aa, Artificial Sequence
  Cyclic GFR-binding peptide
  MOD_RES (14)..(15): Xaa is C or S
IYLISIPSLDQSVXXPSA

SEQ ID NO: 4081 - protein, 18 aa, Artificial Sequence
  Cyclic GFR-binding peptide
  MOD_RES (14)..(15): Xaa is C or S
KYLISIPSLDQSVXXPSA

SEQ ID NO: 4082 - protein, 13 aa, Artificial Sequence
  Cyclic GFR-binding peptide
LYLISIPELDQPV

SEQ ID NO: 4083 - protein, 14 aa, Artificial Sequence
  Cyclic GFR-binding peptide
  MOD_RES (14)..(14): Xaa is C or S
FYLISIANLKTPVX

SEQ ID NO: 4084 - protein, 13 aa, Artificial Sequence
  Cyclic GFR-binding peptide
LYLMSIPELETPV

SEQ ID NO: 4085 - protein, 15 aa, Artificial Sequence
  Cyclic GFR-binding peptide
  MOD_RES (14)..(15): Xaa is C or S
LYLVSIPELKTPAXX

SEQ ID NO: 4086 - protein, 19 aa, Artificial Sequence
  Cyclic GFR-binding peptide
  MOD_RES (14)..(15): Xaa is C or S
KYLISIPSLRAPVXXSAPA

SEQ ID NO: 4087 - protein, 16 aa, Artificial Sequence
  Cyclic GFR-binding peptide
VVNNAADIYLISIPSL

SEQ ID NO: 4088 - protein, 15 aa, Artificial Sequence
  Cyclic GFR-binding peptide
VVKENEDLYLMSIPE

SEQ ID NO: 4089 - protein, 14 aa, Artificial Sequence
  Cyclic GFR-binding peptide
  MOD_RES (14)..(14): Xaa is C or S
LYLISIPELDQSVX

SEQ ID NO: 4090 - protein, 17 aa, Artificial Sequence
  Cyclic GFR-binding peptide
VVNNAADKYLISIPSLR

SEQ ID NO: 4091 - protein, 17 aa, Artificial Sequence
  Cyclic GFR-binding peptide
VKPTRGVKYLISIPSLD

SEQ ID NO: 4092 - protein, 19 aa, Artificial Sequence
  Cyclic GFR-binding peptide
VVNNAADKYLISIPSLRAP

SEQ ID NO: 4093 - protein, 16 aa, Artificial Sequence
  Cyclic GFR-binding peptide
TPVGMDDFYLVSIANL

SEQ ID NO: 4094 - protein, 19 aa, Artificial Sequence
  Cyclic GFR-binding peptide
  MOD_RES (14)..(15): Xaa is C or S
LYLVSIPELKTPAXXPKPV

SEQ ID NO: 4095 - protein, 16 aa, Artificial Sequence
  Cyclic GFR-binding peptide
  MOD_RES (14)..(14): Xaa is C or S
LYLVSIPELKTPAXTP

SEQ ID NO: 4096 - protein, 17 aa, Artificial Sequence
  Cyclic GFR-binding peptide
  MOD_RES (14)..(15): Xaa is C or S
LYLISIPELRAPVXXSA

SEQ ID NO: 4097 - protein, 19 aa, Artificial Sequence
  Cyclic GFR-binding peptide
IVNSSDDLYLVSIPELKTP

SEQ ID NO: 4098 - protein, 15 aa, Artificial Sequence
  Cyclic GFR-binding peptide
VKPTRGVIYLISIPS

SEQ ID NO: 4099 - protein, 16 aa, Artificial Sequence
  Cyclic GFR-binding peptide
YTVVGKDLYLISIPEL

SEQ ID NO: 4100 - protein, 14 aa, Artificial Sequence
  Cyclic GFR-binding peptide
  MOD_RES (14)..(14): Xaa is C or S
IYLISIPSLKTPVX

SEQ ID NO: 4101 - protein, 18 aa, Artificial Sequence
  Cyclic GFR-binding peptide
  MOD_RES (14)..(15): Xaa is C or S
IYLMSIPSLETPVXXAKP

SEQ ID NO: 4102 - protein, 17 aa, Artificial Sequence
  Cyclic GFR-binding peptide
VVKENEDKYLMSIPSLE

SEQ ID NO: 4103 - protein, 14 aa, Artificial Sequence
  Cyclic GFR-binding peptide
  MOD_RES (14)..(14): Xaa is C or S
KYLISIPSLKTPVX

SEQ ID NO: 4104 - protein, 19 aa, Artificial Sequence
  Cyclic GFR-binding peptide
  MOD_RES (14)..(15): Xaa is C or S
LYLVSIPELKTPVXXAKGV

SEQ ID NO: 4105 - protein, 18 aa, Artificial Sequence
  Cyclic GFR-binding peptide
VVNNAADLYLISIPELRA

SEQ ID NO: 4106 - protein, 18 aa, Artificial Sequence
  Cyclic GFR-binding peptide
YTVVGKDFYLISIANLKT

SEQ ID NO: 4107 - protein, 16 aa, Artificial Sequence
  Cyclic GFR-binding peptide
  MOD_RES (14)..(15): Xaa is C or S
LYLISIPELDQPVXXP

SEQ ID NO: 4108 - protein, 18 aa, Artificial Sequence
  Cyclic GFR-binding peptide
  MOD_RES (14)..(15): Xaa is C or S
FYLVSIANLKTPAXXAKP

SEQ ID NO: 4109 - protein, 17 aa, Artificial Sequence
  Cyclic GFR-binding peptide
IVNSSDDFYLVSIANLQ

SEQ ID NO: 4110 - protein, 17 aa, Artificial Sequence
  Cyclic GFR-binding peptide
IVNSSDDFYLVSIANLK

SEQ ID NO: 4111 - protein, 19 aa, Artificial Sequence
  Cyclic GFR-binding peptide
VKPTRGVLYLISIPELDQP

SEQ ID NO: 4112 - protein, 17 aa, Artificial Sequence
  Cyclic GFR-binding peptide
  MOD_RES (14)..(15): Xaa is C or S
LYLISIPELDQSVXXPS

SEQ ID NO: 4113 - protein, 16 aa, Artificial Sequence
  Cyclic GFR-binding peptide
  MOD_RES (14)..(15): Xaa is C or S
FYLISIANLRAPVXXS

SEQ ID NO: 4114 - protein, 16 aa, Artificial Sequence
  Cyclic GFR-binding peptide
VKPKRGVIYLISIPSL

SEQ ID NO: 4115 - protein, 18 aa, Artificial Sequence
  Cyclic GFR-binding peptide
IVNNSSDFYLVSIANLKT

SEQ ID NO: 4116 - protein, 16 aa, Artificial Sequence
  Cyclic GFR-binding peptide
VVKENEDFYLMSIANL

SEQ ID NO: 4117 - protein, 27 aa, Artificial Sequence
  Cyclic GFR-binding peptide
  MOD_RES (21)..(22): Xaa is C or S
YTVVGKDLYLISIPELKTPVXXAKSAK

SEQ ID NO: 4118 - protein, 20 aa, Artificial Sequence
  Cyclic GFR-binding peptide
  MOD_RES (14)..(15): Xaa is C or S
LYLISIPELDQSVXXPSASA

SEQ ID NO: 4119 - protein, 19 aa, Artificial Sequence
  Cyclic GFR-binding peptide
  MOD_RES (14)..(15): Xaa is C or S
FYLISIANLRAPVXXSAPA

SEQ ID NO: 4120 - protein, 16 aa, Artificial Sequence
  Cyclic GFR-binding peptide
VKPTRGVLYLISIPEL

SEQ ID NO: 4121 - protein, 17 aa, Artificial Sequence
  Cyclic GFR-binding peptide
  MOD_RES (14)..(14): Xaa is C or S
LYLVSIPELKTPAXTPK

SEQ ID NO: 4122 - protein, 18 aa, Artificial Sequence
  Cyclic GFR-binding peptide
IVNSSDDIYLVSIPSLQT

SEQ ID NO: 4123 - protein, 15 aa, Artificial Sequence
  Cyclic GFR-binding peptide
VVNNAADFYLISIAN

SEQ ID NO: 4124 - protein, 18 aa, Artificial Sequence
  Cyclic GFR-binding peptide
IVNSSDDIYLVSIPSLKT

SEQ ID NO: 4125 - protein, 17 aa, Artificial Sequence
  Cyclic GFR-binding peptide
VKPKRGVLYLISIPELA

SEQ ID NO: 4126 - protein, 16 aa, Artificial Sequence
  Cyclic GFR-binding peptide
  MOD_RES (14)..(15): Xaa is C or S
KYLISIPSLRAPVXXS

SEQ ID NO: 4127 - protein, 17 aa, Artificial Sequence
  Cyclic GFR-binding peptide
TPVGMDDKYLVSIPSLK

SEQ ID NO: 4128 - protein, 17 aa, Artificial Sequence
  Cyclic GFR-binding peptide
  MOD_RES (14)..(15): Xaa is C or S
LYLVSIPELKTPAXXAK

SEQ ID NO: 4129 - protein, 13 aa, Artificial Sequence
  Cyclic GFR-binding peptide
FYLISIANLRAPV

SEQ ID NO: 4130 - protein, 15 aa, Artificial Sequence
  Cyclic GFR-binding peptide
VVKENEDKYLMSIPS

SEQ ID NO: 4131 - protein, 15 aa, Artificial Sequence
  Cyclic GFR-binding peptide
VKPKRGVFYLISIAN

SEQ ID NO: 4132 - protein, 20 aa, Artificial Sequence
  Cyclic GFR-binding peptide
  MOD_RES (14)..(15): Xaa is C or S
LYLMSIPELETPVXXAKPIS

SEQ ID NO: 4133 - protein, 20 aa, Artificial Sequence
  Cyclic GFR-binding peptide
  MOD_RES (14)..(15): Xaa is C or S
LYLISIPELRAPVXXSAPAA

SEQ ID NO: 4134 - protein, 20 aa, Artificial Sequence
  Cyclic GFR-binding peptide
  MOD_RES (14)..(14): Xaa is C or S
LYLVSIPELKTPAXTPKTVH

SEQ ID NO: 4135 - protein, 15 aa, Artificial Sequence
  Cyclic GFR-binding peptide
  MOD_RES (14)..(15): Xaa is C or S
KYLISIPSLRAPVXX

SEQ ID NO: 4136 - protein, 15 aa, Artificial Sequence
  Cyclic GFR-binding peptide
IVNSSDDLYLVSIPE

SEQ ID NO: 4137 - protein, 15 aa, Artificial Sequence
  Cyclic GFR-binding peptide
  MOD_RES (14)..(15): Xaa is C or S
LYLMSIPELETPVXX

SEQ ID NO: 4138 - protein, 17 aa, Artificial Sequence
  Cyclic GFR-binding peptide
VKPTRGVLYLISIPELD

SEQ ID NO: 4139 - protein, 19 aa, Artificial Sequence
  Cyclic GFR-binding peptide
VVNNAADFYLISIANLRAP

SEQ ID NO: 4140 - protein, 15 aa, Artificial Sequence
  Cyclic GFR-binding peptide
  MOD_RES (14)..(14): Xaa is C or S
LYLVSIPELKTPAXT

SEQ ID NO: 4141 - protein, 15 aa, Artificial Sequence
  Cyclic GFR-binding peptide
  MOD_RES (14)..(15): Xaa is C or S
LYLISIPELDQPVXX

SEQ ID NO: 4142 - protein, 17 aa, Artificial Sequence
  Cyclic GFR-binding peptide
  MOD_RES (14)..(15): Xaa is C or S
FYLISIANLDQPVXXPS

SEQ ID NO: 4143 - protein, 17 aa, Artificial Sequence
  Cyclic GFR-binding peptide
YTVVGKDLYLISIPELK

SEQ ID NO: 4144 - protein, 20 aa, Artificial Sequence
  Cyclic GFR-binding peptide
  MOD_RES (14)..(15): Xaa is C or S
FYLVSIANLKTPAXXAKPVA

SEQ ID NO: 4145 - protein, 18 aa, Artificial Sequence
  Cyclic GFR-binding peptide
VKPKRGVIYLISIPSLAQ

SEQ ID NO: 4146 - protein, 19 aa, Artificial Sequence
  Cyclic GFR-binding peptide
TPVGMDDLYLVSIPELKTP

SEQ ID NO: 4147 - protein, 14 aa, Artificial Sequence
  Cyclic GFR-binding peptide
  MOD_RES (14)..(14): Xaa is C or S
LYLVSIPELQTPAX

SEQ ID NO: 4148 - protein, 17 aa, Artificial Sequence
  Cyclic GFR-binding peptide
IKPTKGIIYLISIPSLD

SEQ ID NO: 4149 - protein, 17 aa, Artificial Sequence
  Cyclic GFR-binding peptide
VVNNAADFYLISIANLR

SEQ ID NO: 4150 - protein, 19 aa, Artificial Sequence
  Cyclic GFR-binding peptide
  MOD_RES (14)..(15): Xaa is C or S
LYLISIPELAQPVXXPAAS

SEQ ID NO: 4151 - protein, 18 aa, Artificial Sequence
  Cyclic GFR-binding peptide
  MOD_RES (14)..(15): Xaa is C or S
FYLISIANLRAPVXXSAP

SEQ ID NO: 4152 - protein, 27 aa, Artificial Sequence
  Cyclic GFR-binding peptide
  MOD_RES (21)..(22): Xaa is C or S
IKPTKGIIYLISIPSLDQSVXXPSASA

SEQ ID NO: 4153 - protein, 18 aa, Artificial Sequence
  Cyclic GFR-binding peptide
VVKENEDIYLMSIPSLET

SEQ ID NO: 4154 - protein, 17 aa, Artificial Sequence
  Cyclic GFR-binding peptide
IVNNSSDLYLVSIPELK

SEQ ID NO: 4155 - protein, 27 aa, Artificial Sequence
  Cyclic GFR-binding peptide
  MOD_RES (21)..(21): Xaa is C or S
IVNSSDDIYLVSIPSLKTPAXTPKTVH

SEQ ID NO: 4156 - protein, 19 aa, Artificial Sequence
  Cyclic GFR-binding peptide
VVKENEDLYLMSIPELETP

SEQ ID NO: 4157 - protein, 15 aa, Artificial Sequence
  Cyclic GFR-binding peptide
IVNSSDDFYLVSIAN

SEQ ID NO: 4158 - protein, 15 aa, Artificial Sequence
  Cyclic GFR-binding peptide
YTVVGKDIYLISIPS

SEQ ID NO: 4159 - protein, 18 aa, Artificial Sequence
  Cyclic GFR-binding peptide
  MOD_RES (14)..(15): Xaa is C or S
FYLMSIANLETPVXXAKP

SEQ ID NO: 4160 - protein, 15 aa, Artificial Sequence
  Cyclic GFR-binding peptide
TPVGMDDKYLVSIPS

SEQ ID NO: 4161 - protein, 13 aa, Artificial Sequence
  Cyclic GFR-binding peptide
LYLVSIPELKTPV

SEQ ID NO: 4162 - protein, 18 aa, Artificial Sequence
  Cyclic GFR-binding peptide
VVKDYEDKYLMSIPSLET

SEQ ID NO: 4163 - protein, 27 aa, Artificial Sequence
  Cyclic GFR-binding peptide
  MOD_RES (21)..(22): Xaa is C or S
VVKENEDLYLMSIPELETPVXXAKPIK

SEQ ID NO: 4164 - protein, 15 aa, Artificial Sequence
  Cyclic GFR-binding peptide
VVNNAADKYLISIPS

SEQ ID NO: 4165 - protein, 16 aa, Artificial Sequence
  Cyclic GFR-binding peptide
IVNNSSDLYLVSIPEL

SEQ ID NO: 4166 - protein, 13 aa, Artificial Sequence
  Cyclic GFR-binding peptide
KYLISIPSLRAPV

SEQ ID NO: 4167 - protein, 19 aa, Artificial Sequence
  Cyclic GFR-binding peptide
YTVVGKDFYLISIANLKTP

SEQ ID NO: 4168 - protein, 16 aa, Artificial Sequence
  Cyclic GFR-binding peptide
  MOD_RES (14)..(15): Xaa is C or S
LYLVSIPELKTPAXXP

SEQ ID NO: 4169 - protein, 17 aa, Artificial Sequence
  Cyclic GFR-binding peptide
  MOD_RES (14)..(15): Xaa is C or S
IYLMSIPSLETPVXXAK

SEQ ID NO: 4170 - protein, 15 aa, Artificial Sequence
  Cyclic GFR-binding peptide
IVNNSSDIYLVSIPS

SEQ ID NO: 4171 - protein, 15 aa, Artificial Sequence
  Cyclic GFR-binding peptide
  MOD_RES (14)..(15): Xaa is C or S
LYLVSIPELKTPVXX

SEQ ID NO: 4172 - protein, 19 aa, Artificial Sequence
  Cyclic GFR-binding peptide
VVKDYEDIYLMSIPSLETP

SEQ ID NO: 4173 - protein, 17 aa, Artificial Sequence
  Cyclic GFR-binding peptide
  MOD_RES (14)..(15): Xaa is C or S
KYLISIPSLAQPVXXPA

SEQ ID NO: 4174 - protein, 27 aa, Artificial Sequence
  Cyclic GFR-binding peptide
  MOD_RES (21)..(22): Xaa is C or S
VVKDYEDKYLMSIPSLETPVXXAKPIS

SEQ ID NO: 4175 - protein, 27 aa, Artificial Sequence
  Cyclic GFR-binding peptide
  MOD_RES (21)..(22): Xaa is C or S
VVNNAADLYLISIPELRAPVXXSAPAA

SEQ ID NO: 4176 - protein, 17 aa, Artificial Sequence
  Cyclic GFR-binding peptide
  MOD_RES (14)..(15): Xaa is C or S
IYLISIPSLAQPVXXPA

SEQ ID NO: 4177 - protein, 27 aa, Artificial Sequence
  Cyclic GFR-binding peptide
  MOD_RES (21)..(22): Xaa is C or S
IVNNSSDFYLVSIANLKTPAXXAKPVA

SEQ ID NO: 4178 - protein, 18 aa, Artificial Sequence
  Cyclic GFR-binding peptide
  MOD_RES (14)..(15): Xaa is C or S
FYLVSIANLKTPVXXAKG

SEQ ID NO: 4179 - protein, 15 aa, Artificial Sequence
  Cyclic GFR-binding peptide
  MOD_RES (14)..(15): Xaa is C or S
FYLISIANLRAPVXX

SEQ ID NO: 4180 - protein, 17 aa, Artificial Sequence
  Cyclic GFR-binding peptide
VKPTRGVFYLISIANLD

SEQ ID NO: 4181 - protein, 17 aa, Artificial Sequence
  Cyclic GFR-binding peptide
  MOD_RES (14)..(15): Xaa is C or S
FYLMSIANLETPVXXAK

SEQ ID NO: 4182 - protein, 19 aa, Artificial Sequence
  Cyclic GFR-binding peptide
IKPTKGIIYLISIPSLDQS

SEQ ID NO: 4183 - protein, 17 aa, Artificial Sequence
  Cyclic GFR-binding peptide
  MOD_RES (14)..(15): Xaa is C or S
FYLISIANLAQPVXXPA

SEQ ID NO: 4184 - protein, 17 aa, Artificial Sequence
  Cyclic GFR-binding peptide
IVNSSDDKYLVSIPSLQ

SEQ ID NO: 4185 - protein, 19 aa, Artificial Sequence
  Cyclic GFR-binding peptide
VVNNAADLYLISIPELRAP

SEQ ID NO: 4186 - protein, 18 aa, Artificial Sequence
  Cyclic GFR-binding peptide
  MOD_RES (14)..(15): Xaa is C or S
IYLVSIPSLKTPVXXAKG

SEQ ID NO: 4187 - protein, 19 aa, Artificial Sequence
  Cyclic GFR-binding peptide
VKPKRGVLYLISIPELAQP

SEQ ID NO: 4188 - protein, 18 aa, Artificial Sequence
  Cyclic GFR-binding peptide
TPVGMDDIYLVSIPSLKT

SEQ ID NO: 4189 - protein, 19 aa, Artificial Sequence
  Cyclic GFR-binding peptide
  MOD_RES (14)..(15): Xaa is C or S
LYLISIPELDQPVXXPSAS

SEQ ID NO: 4190 - protein, 17 aa, Artificial Sequence
  Cyclic GFR-binding peptide
IVNSSDDKYLVSIPSLK

SEQ ID NO: 4191 - protein, 20 aa, Artificial Sequence
  Cyclic GFR-binding peptide
  MOD_RES (14)..(15): Xaa is C or S
LYLVSIPELKTPVXXAKGVK

SEQ ID NO: 4192 - protein, 17 aa, Artificial Sequence
  Cyclic GFR-binding peptide
  MOD_RES (14)..(15): Xaa is C or S
KYLMSIPSLETPVXXAK

SEQ ID NO: 4193 - protein, 19 aa, Artificial Sequence
  Cyclic GFR-binding peptide
IVNNSSDFYLVSIANLKTP

SEQ ID NO: 4194 - protein, 20 aa, Artificial Sequence
  Cyclic GFR-binding peptide
  MOD_RES (14)..(15): Xaa is C or S
IYLVSIPSLQTPAXXPKPVT

SEQ ID NO: 4195 - protein, 17 aa, Artificial Sequence
  Cyclic GFR-binding peptide
  MOD_RES (14)..(15): Xaa is C or S
LYLISIPELAQPVXXPA

SEQ ID NO: 4196 - protein, 20 aa, Artificial Sequence
  Cyclic GFR-binding peptide
  MOD_RES (14)..(15): Xaa is C or S
KYLVSIPSLQTPAXXPKPVT

SEQ ID NO: 4197 - protein, 18 aa, Artificial Sequence
  Cyclic GFR-binding peptide
  MOD_RES (14)..(15): Xaa is C or S
IYLISIPSLDQPVXXPSA

SEQ ID NO: 4198 - protein, 19 aa, Artificial Sequence
  Cyclic GFR-binding peptide
TPVGMDDKYLVSIPSLKTP

SEQ ID NO: 4199 - protein, 18 aa, Artificial Sequence
  Cyclic GFR-binding peptide
  MOD_RES (14)..(15): Xaa is C or S
KYLISIPSLDQPVXXPSA

SEQ ID NO: 4200 - protein, 16 aa, Artificial Sequence
  Cyclic GFR-binding peptide
VKPTRGVIYLISIPSL

SEQ ID NO: 4201 - protein, 14 aa, Artificial Sequence
  Cyclic GFR-binding peptide
  MOD_RES (14)..(14): Xaa is C or S
IYLVSIPSLKTPVX

SEQ ID NO: 4202 - protein, 18 aa, Artificial Sequence
  Cyclic GFR-binding peptide
YTVVGKDLYLISIPELKT

SEQ ID NO: 4203 - protein, 17 aa, Artificial Sequence
  Cyclic GFR-binding peptide
  MOD_RES (14)..(15): Xaa is C or S
FYLVSIANLKTPAXXAK

SEQ ID NO: 4204 - protein, 17 aa, Artificial Sequence
  Cyclic GFR-binding peptide
  MOD_RES (14)..(15): Xaa is C or S
KYLISIPSLDQPVXXPS

SEQ ID NO: 4205 - protein, 17 aa, Artificial Sequence
  Cyclic GFR-binding peptide
  MOD_RES (14)..(15): Xaa is C or S
IYLISIPSLDQPVXXPS

SEQ ID NO: 4206 - protein, 16 aa, Artificial Sequence
  Cyclic GFR-binding peptide
  MOD_RES (14)..(15): Xaa is C or S
IYLISIPSLAQPVXXP

SEQ ID NO: 4207 - protein, 20 aa, Artificial Sequence
  Cyclic GFR-binding peptide
  MOD_RES (14)..(15): Xaa is C or S
KYLVSIPSLKTPAXXAKPVA

SEQ ID NO: 4208 - protein, 27 aa, Artificial Sequence
  Cyclic GFR-binding peptide
  MOD_RES (21)..(21): Xaa is C or S
IVNSSDDLYLVSIPELKTPAXTPKTVH

SEQ ID NO: 4209 - protein, 20 aa, Artificial Sequence
  Cyclic GFR-binding peptide
  MOD_RES (14)..(15): Xaa is C or S
IYLVSIPSLKTPAXXAKPVA

SEQ ID NO: 4210 - protein, 16 aa, Artificial Sequence
  Cyclic GFR-binding peptide
  MOD_RES (14)..(15): Xaa is C or S
KYLISIPSLAQPVXXP

SEQ ID NO: 4211 - protein, 14 aa, Artificial Sequence
  Cyclic GFR-binding peptide
  MOD_RES (14)..(14): Xaa is C or S
FYLVSIANLKTPAX

SEQ ID NO: 4212 - protein, 27 aa, Artificial Sequence
  Cyclic GFR-binding peptide
  MOD_RES (21)..(22): Xaa is C or S
VVKDYEDFYLMSIANLETPVXXAKPIS

SEQ ID NO: 4213 - protein, 16 aa, Artificial Sequence
  Cyclic GFR-binding peptide
  MOD_RES (14)..(15): Xaa is C or S
LYLVSIPELQTPAXXP

SEQ ID NO: 4214 - protein, 17 aa, Artificial Sequence
  Cyclic GFR-binding peptide
IVNSSDDLYLVSIPELK

SEQ ID NO: 4215 - protein, 17 aa, Artificial Sequence
  Cyclic GFR-binding peptide
IVNSSDDLYLVSIPELQ

SEQ ID NO: 4216 - protein, 19 aa, Artificial Sequence
  Cyclic GFR-binding peptide
VKPTRGVKYLISIPSLDQP

SEQ ID NO: 4217 - protein, 20 aa, Artificial Sequence
  Cyclic GFR-binding peptide
  MOD_RES (14)..(15): Xaa is C or S
LYLVSIPELQTPAXXPKPVT

SEQ ID NO: 4218 - protein, 17 aa, Artificial Sequence
  Cyclic GFR-binding peptide
TPVGMDDLYLVSIPELK

SEQ ID NO: 4219 - protein, 18 aa, Artificial Sequence
  Cyclic GFR-binding peptide
VVNNAADIYLISIPSLRA

SEQ ID NO: 4220 - protein, 18 aa, Artificial Sequence
  Cyclic GFR-binding peptide
VVKDYEDLYLMSIPELET

SEQ ID NO: 4221 - protein, 18 aa, Artificial Sequence
  Cyclic GFR-binding peptide
IVNNSSDLYLVSIPELKT

SEQ ID NO: 4222 - protein, 19 aa, Artificial Sequence
  Cyclic GFR-binding peptide
  MOD_RES (14)..(15): Xaa is C or S
LYLVSIPELQTPAXXPKPV

SEQ ID NO: 4223 - protein, 17 aa, Artificial Sequence
  Cyclic GFR-binding peptide
  MOD_RES (14)..(15): Xaa is C or S
FYLVSIANLKTPVXXAK

SEQ ID NO: 4224 - protein, 27 aa, Artificial Sequence
  Cyclic GFR-binding peptide
  MOD_RES (21)..(22): Xaa is C or S
IVNSSDDLYLVSIPELKTPAXXPKPVY

SEQ ID NO: 4225 - protein, 15 aa, Artificial Sequence
  Cyclic GFR-binding peptide
YTVVGKDLYLISIPE

SEQ ID NO: 4226 - protein, 19 aa, Artificial Sequence
  Cyclic GFR-binding peptide
  MOD_RES (14)..(15): Xaa is C or S
IYLISIPSLDQSVXXPSAS

SEQ ID NO: 4227 - protein, 27 aa, Artificial Sequence
  Cyclic GFR-binding peptide
  MOD_RES (21)..(22): Xaa is C or S
TPVGMDDKYLVSIPSLKTPVXXAKGVK

SEQ ID NO: 4228 - protein, 19 aa, Artificial Sequence
  Cyclic GFR-binding peptide
  MOD_RES (14)..(15): Xaa is C or S
KYLISIPSLDQSVXXPSAS

SEQ ID NO: 4229 - protein, 27 aa, Artificial Sequence
  Cyclic GFR-binding peptide
  MOD_RES (21)..(22): Xaa is C or S
IKPTKGIKYLISIPSLDQSVXXPSASA

SEQ ID NO: 4230 - protein, 17 aa, Artificial Sequence
  Cyclic GFR-binding peptide
  MOD_RES (14)..(15): Xaa is C or S
LYLVSIPELKTPAXXPK

SEQ ID NO: 4231 - protein, 19 aa, Artificial Sequence
  Cyclic GFR-binding peptide
  MOD_RES (14)..(14): Xaa is C or S
FYLVSIANLKTPAXTPKTV

SEQ ID NO: 4232 - protein, 16 aa, Artificial Sequence
  Cyclic GFR-binding peptide
IVNNSSDIYLVSIPSL

SEQ ID NO: 4233 - protein, 15 aa, Artificial Sequence
  Cyclic GFR-binding peptide
  MOD_RES (14)..(15): Xaa is C or S
FYLISIANLDQPVXX

SEQ ID NO: 4234 - protein, 27 aa, Artificial Sequence
  Cyclic GFR-binding peptide
  MOD_RES (21)..(22): Xaa is C or S
VVKENEDKYLMSIPSLETPVXXAKPIK

SEQ ID NO: 4235 - protein, 19 aa, Artificial Sequence
  Cyclic GFR-binding peptide
IVNSSDDKYLVSIPSLKTP

SEQ ID NO: 4236 - protein, 15 aa, Artificial Sequence
  Cyclic GFR-binding peptide
IKPTKGIIYLISIPS

SEQ ID NO: 4237 - protein, 14 aa, Artificial Sequence
  Cyclic GFR-binding peptide
  MOD_RES (14)..(14): Xaa is C or S
KYLMSIPSLETPVX

SEQ ID NO: 4238 - protein, 17 aa, Artificial Sequence
  Cyclic GFR-binding peptide
VKPKRGVKYLISIPSLA

SEQ ID NO: 4239 - protein, 15 aa, Artificial Sequence
  Cyclic GFR-binding peptide
IVNNSSDLYLVSIPE

SEQ ID NO: 4240 - protein, 17 aa, Artificial Sequence
  Cyclic GFR-binding peptide
YTVVGKDIYLISIPSLK

SEQ ID NO: 4241 - protein, 20 aa, Artificial Sequence
  Cyclic GFR-binding peptide
  MOD_RES (14)..(15): Xaa is C or S
FYLMSIANLETPVXXAKPIK

SEQ ID NO: 4242 - protein, 17 aa, Artificial Sequence
  Cyclic GFR-binding peptide
VVKENEDFYLMSIANLE

SEQ ID NO: 4243 - protein, 16 aa, Artificial Sequence
  Cyclic GFR-binding peptide
VVKENEDLYLMSIPEL

SEQ ID NO: 4244 - protein, 18 aa, Artificial Sequence
  Cyclic GFR-binding peptide
  MOD_RES (14)..(15): Xaa is C or S
LYLISIPELDQPVXXPSA

SEQ ID NO: 4245 - protein, 16 aa, Artificial Sequence
  Cyclic GFR-binding peptide
IVNSSDDIYLVSIPSL

SEQ ID NO: 4246 - protein, 20 aa, Artificial Sequence
  Cyclic GFR-binding peptide
  MOD_RES (14)..(15): Xaa is C or S
LYLISIPELAQPVXXPAASA

SEQ ID NO: 4247 - protein, 19 aa, Artificial Sequence
  Cyclic GFR-binding peptide
IVNSSDDKYLVSIPSLQTP

SEQ ID NO: 4248 - protein, 17 aa, Artificial Sequence
  Cyclic GFR-binding peptide
VVKENEDLYLMSIPELE

SEQ ID NO: 4249 - protein, 16 aa, Artificial Sequence
  Cyclic GFR-binding peptide
TPVGMDDKYLVSIPSL

SEQ ID NO: 4250 - protein, 16 aa, Artificial Sequence
  Cyclic GFR-binding peptide
YTVVGKDIYLISIPSL

SEQ ID NO: 4251 - protein, 17 aa, Artificial Sequence
  Cyclic GFR-binding peptide
IVNNSSDIYLVSIPSLK

SEQ ID NO: 4252 - protein, 13 aa, Artificial Sequence
  Cyclic GFR-binding peptide
FYLISIANLKTPV

SEQ ID NO: 4253 - protein, 17 aa, Artificial Sequence
  Cyclic GFR-binding peptide
IVNSSDDIYLVSIPSLK

SEQ ID NO: 4254 - protein, 17 aa, Artificial Sequence
  Cyclic GFR-binding peptide
IVNSSDDIYLVSIPSLQ

SEQ ID NO: 4255 - protein, 27 aa, Artificial Sequence
  Cyclic GFR-binding peptide
  MOD_RES (21)..(22): Xaa is C or S
VKPKRGVKYLISIPSLAQPVXXPAASA

SEQ ID NO: 4256 - protein, 27 aa, Artificial Sequence
  Cyclic GFR-binding peptide
  MOD_RES (21)..(22): Xaa is C or S
VKPTRGVLYLISIPELDQPVXXPSASA

SEQ ID NO: 4257 - protein, 20 aa, Artificial Sequence
  Cyclic GFR-binding peptide
  MOD_RES (14)..(15): Xaa is C or S
IYLVSIPSLKTPVXXAKGVK

SEQ ID NO: 4258 - protein, 15 aa, Artificial Sequence
  Cyclic GFR-binding peptide
  MOD_RES (14)..(15): Xaa is C or S
FYLISIANLKTPVXX

SEQ ID NO: 4259 - protein, 15 aa, Artificial Sequence
  Cyclic GFR-binding peptide
  MOD_RES (14)..(15): Xaa is C or S
FYLISIANLAQPVXX

SEQ ID NO: 4260 - protein, 13 aa, Artificial Sequence
  Cyclic GFR-binding peptide
FYLISIANLAQPV

SEQ ID NO: 4261 - protein, 17 aa, Artificial Sequence
  Cyclic GFR-binding peptide
  MOD_RES (14)..(15): Xaa is C or S
LYLMSIPELETPVXXAK

SEQ ID NO: 4262 - protein, 15 aa, Artificial Sequence
  Cyclic GFR-binding peptide
  MOD_RES (14)..(14): Xaa is C or S
IYLVSIPSLKTPAXT

SEQ ID NO: 4263 - protein, 16 aa, Artificial Sequence
  Cyclic GFR-binding peptide
VVNNAADLYLISIPEL

SEQ ID NO: 4264 - protein, 19 aa, Artificial Sequence
  Cyclic GFR-binding peptide
VKPKRGVKYLISIPSLAQP

SEQ ID NO: 4265 - protein, 15 aa, Artificial Sequence
  Cyclic GFR-binding peptide
VKPTRGVLYLISIPE

SEQ ID NO: 4266 - protein, 18 aa, Artificial Sequence
  Cyclic GFR-binding peptide
YTVVGKDKYLISIPSLKT

SEQ ID NO: 4267 - protein, 27 aa, Artificial Sequence
  Cyclic GFR-binding peptide
  MOD_RES (21)..(22): Xaa is C or S
VKPKRGVLYLISIPELAQPVXXPAASA

SEQ ID NO: 4268 - protein, 19 aa, Artificial Sequence
  Cyclic GFR-binding peptide
IVNSSDDFYLVSIANLKTP

SEQ ID NO: 4269 - protein, 15 aa, Artificial Sequence
  Cyclic GFR-binding peptide
  MOD_RES (14)..(14): Xaa is C or S
KYLVSIPSLKTPAXT

SEQ ID NO: 4270 - protein, 15 aa, Artificial Sequence
  Cyclic GFR-binding peptide
YTVVGKDFYLISIAN

SEQ ID NO: 4271 - protein, 18 aa, Artificial Sequence
  Cyclic GFR-binding peptide
VVKDYEDFYLMSIANLET

SEQ ID NO: 4272 - protein, 17 aa, Artificial Sequence
  Cyclic GFR-binding peptide
VKPKRGVFYLISIANLA

SEQ ID NO: 4273 - protein, 14 aa, Artificial Sequence
  Cyclic GFR-binding peptide
  MOD_RES (14)..(14): Xaa is C or S
FYLISIANLDQSVX

SEQ ID NO: 4274 - protein, 13 aa, Artificial Sequence
  Cyclic GFR-binding peptide
LYLVSIPELKTPA

SEQ ID NO: 4275 - protein, 27 aa, Artificial Sequence
  Cyclic GFR-binding peptide
  MOD_RES (21)..(22): Xaa is C or S
IVNNSSDKYLVSIPSLKTPAXXAKPVA

SEQ ID NO: 4276 - protein, 15 aa, Artificial Sequence
  Cyclic GFR-binding peptide
  MOD_RES (14)..(15): Xaa is C or S
KYLMSIPSLETPVXX

SEQ ID NO: 4277 - protein, 16 aa, Artificial Sequence
  Cyclic GFR-binding peptide
TPVGMDDLYLVSIPEL

SEQ ID NO: 4278 - protein, 14 aa, Artificial Sequence
  Cyclic GFR-binding peptide
  MOD_RES (14)..(14): Xaa is C or S
FYLISIANLDQPVX

SEQ ID NO: 4279 - protein, 15 aa, Artificial Sequence
  Cyclic GFR-binding peptide
  MOD_RES (14)..(15): Xaa is C or S
IYLMSIPSLETPVXX

SEQ ID NO: 4280 - protein, 13 aa, Artificial Sequence
  Cyclic GFR-binding peptide
FYLISIANLDQPV

SEQ ID NO: 4281 - protein, 20 aa, Artificial Sequence
  Cyclic GFR-binding peptide
  MOD_RES (14)..(15): Xaa is C or S
IYLISIPSLDQPVXXPSASA

SEQ ID NO: 4282 - protein, 16 aa, Artificial Sequence
  Cyclic GFR-binding peptide
IVNSSDDFYLVSIANL

SEQ ID NO: 4283 - protein, 20 aa, Artificial Sequence
  Cyclic GFR-binding peptide
  MOD_RES (14)..(15): Xaa is C or S
KYLISIPSLDQPVXXPSASA

SEQ ID NO: 4284 - protein, 19 aa, Artificial Sequence
  Cyclic GFR-binding peptide
YTVVGKDIYLISIPSLKTP

SEQ ID NO: 4285 - protein, 15 aa, Artificial Sequence
  Cyclic GFR-binding peptide
IVNNSSDFYLVSIAN

SEQ ID NO: 4286 - protein, 17 aa, Artificial Sequence
  Cyclic GFR-binding peptide
  MOD_RES (14)..(15): Xaa is C or S
LYLVSIPELKTPVXXAK

SEQ ID NO: 4287 - protein, 16 aa, Artificial Sequence
  Cyclic GFR-binding peptide
VVKENEDKYLMSIPSL

SEQ ID NO: 4288 - protein, 19 aa, Artificial Sequence
  Cyclic GFR-binding peptide
  MOD_RES (14)..(15): Xaa is C or S
FYLVSIANLKTPVXXAKGV

SEQ ID NO: 4289 - protein, 14 aa, Artificial Sequence
  Cyclic GFR-binding peptide
  MOD_RES (14)..(14): Xaa is C or S
LYLISIPELAQPVX

SEQ ID NO: 4290 - protein, 14 aa, Artificial Sequence
  Cyclic GFR-binding peptide
  MOD_RES (14)..(14): Xaa is C or S
IYLMSIPSLETPVX

SEQ ID NO: 4291 - protein, 16 aa, Artificial Sequence
  Cyclic GFR-binding peptide
  MOD_RES (14)..(15): Xaa is C or S
FYLVSIANLKTPVXXA

SEQ ID NO: 4292 - protein, 16 aa, Artificial Sequence
  Cyclic GFR-binding peptide
  MOD_RES (14)..(15): Xaa is C or S
IYLISIPSLDQSVXXP

SEQ ID NO: 4293 - protein, 17 aa, Artificial Sequence
  Cyclic GFR-binding peptide
  MOD_RES (14)..(15): Xaa is C or S
FYLVSIANLKTPAXXPK

SEQ ID NO: 4294 - protein, 16 aa, Artificial Sequence
  Cyclic GFR-binding peptide
  MOD_RES (14)..(15): Xaa is C or S
KYLISIPSLDQSVXXP

SEQ ID NO: 4295 - protein, 14 aa, Artificial Sequence
  Cyclic GFR-binding peptide
  MOD_RES (14)..(14): Xaa is C or S
LYLVSIPELKTPAX

SEQ ID NO: 4296 - protein, 27 aa, Artificial Sequence
  Cyclic GFR-binding peptide
  MOD_RES (21)..(22): Xaa is C or S
VVNNAADKYLISIPSLRAPVXXSAPAA

SEQ ID NO: 4297 - protein, 18 aa, Artificial Sequence
  Cyclic GFR-binding peptide
  MOD_RES (14)..(14): Xaa is C or S
LYLVSIPELKTPAXTPKT

SEQ ID NO: 4298 - protein, 17 aa, Artificial Sequence
  Cyclic GFR-binding peptide
IKPTKGILYLISIPELD

SEQ ID NO: 4299 - protein, 20 aa, Artificial Sequence
  Cyclic GFR-binding peptide
  MOD_RES (14)..(15): Xaa is C or S
FYLISIANLAQPVXXPAASA

SEQ ID NO: 4300 - protein, 18 aa, Artificial Sequence
  Cyclic GFR-binding peptide
  MOD_RES (14)..(15): Xaa is C or S
KYLISIPSLKTPVXXAKS

SEQ ID NO: 4301 - protein, 18 aa, Artificial Sequence
  Cyclic GFR-binding peptide
  MOD_RES (14)..(15): Xaa is C or S
IYLISIPSLKTPVXXAKS

SEQ ID NO: 4302 - protein, 15 aa, Artificial Sequence
  Cyclic GFR-binding peptide
VKPKRGVIYLISIPS

SEQ ID NO: 4303 - protein, 19 aa, Artificial Sequence
  Cyclic GFR-binding peptide
IVNSSDDLYLVSIPELQTP

SEQ ID NO: 4304 - protein, 17 aa, Artificial Sequence
  Cyclic GFR-binding peptide
  MOD_RES (14)..(15): Xaa is C or S
LYLVSIPELQTPAXXPK

SEQ ID NO: 4305 - protein, 18 aa, Artificial Sequence
  Cyclic GFR-binding peptide
  MOD_RES (14)..(15): Xaa is C or S
FYLISIANLDQSVXXPSA

SEQ ID NO: 4306 - protein, 27 aa, Artificial Sequence
  Cyclic GFR-binding peptide
  MOD_RES (21)..(22): Xaa is C or S
VKPTRGVIYLISIPSLDQPVXXPSASA

SEQ ID NO: 4307 - protein, 14 aa, Artificial Sequence
  Cyclic GFR-binding peptide
  MOD_RES (14)..(14): Xaa is C or S
KYLISIPSLRAPVX

SEQ ID NO: 4308 - protein, 18 aa, Artificial Sequence
  Cyclic GFR-binding peptide
  MOD_RES (14)..(14): Xaa is C or S
FYLVSIANLKTPAXTPKT

SEQ ID NO: 4309 - protein, 16 aa, Artificial Sequence
  Cyclic GFR-binding peptide
IVNSSDDLYLVSIPEL

SEQ ID NO: 4310 - protein, 20 aa, Artificial Sequence
  Cyclic GFR-binding peptide
  MOD_RES (14)..(15): Xaa is C or S
LYLMSIPELETPVXXAKPIK

SEQ ID NO: 4311 - protein, 16 aa, Artificial Sequence
  Cyclic GFR-binding peptide
  MOD_RES (14)..(15): Xaa is C or S
LYLVSIPELKTPVXXA

SEQ ID NO: 4312 - protein, 19 aa, Artificial Sequence
  Cyclic GFR-binding peptide
VVKENEDKYLMSIPSLETP

SEQ ID NO: 4313 - protein, 15 aa, Artificial Sequence
  Cyclic GFR-binding peptide
VKPTRGVFYLISIAN

SEQ ID NO: 4314 - protein, 27 aa, Artificial Sequence
  Cyclic GFR-binding peptide
  MOD_RES (21)..(22): Xaa is C or S
VVKDYEDLYLMSIPELETPVXXAKPIS

SEQ ID NO: 4315 - protein, 18 aa, Artificial Sequence
  Cyclic GFR-binding peptide
VKPTRGVIYLISIPSLDQ

SEQ ID NO: 4316 - protein, 19 aa, Artificial Sequence
  Cyclic GFR-binding peptide
IVNNSSDIYLVSIPSLKTP

SEQ ID NO: 4317 - protein, 17 aa, Artificial Sequence
  Cyclic GFR-binding peptide
TPVGMDDFYLVSIANLK

SEQ ID NO: 4318 - protein, 27 aa, Artificial Sequence
  Cyclic GFR-binding peptide
  MOD_RES (21)..(22): Xaa is C or S
VKPKRGVFYLISIANLAQPVXXPAASA

SEQ ID NO: 4319 - protein, 15 aa, Artificial Sequence
  Cyclic GFR-binding peptide
  MOD_RES (14)..(15): Xaa is C or S
FYLVSIANLKTPAXX

SEQ ID NO: 4320 - protein, 16 aa, Artificial Sequence
  Cyclic GFR-binding peptide
  MOD_RES (14)..(15): Xaa is C or S
LYLMSIPELETPVXXA

SEQ ID NO: 4321 - protein, 18 aa, Artificial Sequence
  Cyclic GFR-binding peptide
  MOD_RES (14)..(15): Xaa is C or S
LYLVSIPELQTPAXXPKP

SEQ ID NO: 4322 - protein, 17 aa, Artificial Sequence
  Cyclic GFR-binding peptide
  MOD_RES (14)..(15): Xaa is C or S
FYLISIANLKTPVXXAK

SEQ ID NO: 4323 - protein, 15 aa, Artificial Sequence
  Cyclic GFR-binding peptide
VVKDYEDIYLMSIPS

SEQ ID NO: 4324 - protein, 27 aa, Artificial Sequence
  Cyclic GFR-binding peptide
  MOD_RES (21)..(22): Xaa is C or S
IVNSSDDKYLVSIPSLKTPAXXPKPVY

SEQ ID NO: 4325 - protein, 20 aa, Artificial Sequence
  Cyclic GFR-binding peptide
  MOD_RES (14)..(15): Xaa is C or S
KYLISIPSLRAPVXXSAPAA

SEQ ID NO: 4326 - protein, 18 aa, Artificial Sequence
  Cyclic GFR-binding peptide
IVNNSSDKYLVSIPSLKT

SEQ ID NO: 4327 - protein, 19 aa, Artificial Sequence
  Cyclic GFR-binding peptide
IVNSSDDFYLVSIANLQTP

SEQ ID NO: 4328 - protein, 13 aa, Artificial Sequence
  Cyclic GFR-binding peptide
LYLVSIPELQTPA

SEQ ID NO: 4329 - protein, 14 aa, Artificial Sequence
  Cyclic GFR-binding peptide
  MOD_RES (14)..(14): Xaa is C or S
LYLISIPELDQPVX

SEQ ID NO: 4330 - protein, 16 aa, Artificial Sequence
  Cyclic GFR-binding peptide
VVNNAADFYLISIANL

SEQ ID NO: 4331 - protein, 27 aa, Artificial Sequence
  Cyclic GFR-binding peptide
  MOD_RES (21)..(21): Xaa is C or S
IVNSSDDFYLVSIANLKTPAXTPKTVH

SEQ ID NO: 4332 - protein, 16 aa, Artificial Sequence
  Cyclic GFR-binding peptide
  MOD_RES (14)..(15): Xaa is C or S
LYLISIPELRAPVXXS

SEQ ID NO: 4333 - protein, 19 aa, Artificial Sequence
  Cyclic GFR-binding peptide
  MOD_RES (14)..(15): Xaa is C or S
LYLVSIPELKTPAXXAKPV

SEQ ID NO: 4334 - protein, 15 aa, Artificial Sequence
  Cyclic GFR-binding peptide
  MOD_RES (14)..(15): Xaa is C or S
LYLVSIPELQTPAXX

SEQ ID NO: 4335 - protein, 19 aa, Artificial Sequence
  Cyclic GFR-binding peptide
  MOD_RES (14)..(14): Xaa is C or S
LYLVSIPELKTPAXTPKTV

SEQ ID NO: 4336 - protein, 18 aa, Artificial Sequence
  Cyclic GFR-binding peptide
  MOD_RES (14)..(15): Xaa is C or S
FYLVSIANLKTPAXXPKP

SEQ ID NO: 4337 - protein, 27 aa, Artificial Sequence
  Cyclic GFR-binding peptide
  MOD_RES (21)..(22): Xaa is C or S
IKPTKGIFYLISIANLDQSVXXPSASA

SEQ ID NO: 4338 - protein, 13 aa, Artificial Sequence
  Cyclic GFR-binding peptide
FYLVSIANLKTPA

SEQ ID NO: 4339 - protein, 17 aa, Artificial Sequence
  Cyclic GFR-binding peptide
  MOD_RES (14)..(15): Xaa is C or S
KYLISIPSLDQSVXXPS

SEQ ID NO: 4340 - protein, 19 aa, Artificial Sequence
  Cyclic GFR-binding peptide
VVKENEDFYLMSIANLETP

SEQ ID NO: 4341 - protein, 19 aa, Artificial Sequence
  Cyclic GFR-binding peptide
YTVVGKDLYLISIPELKTP

SEQ ID NO: 4342 - protein, 17 aa, Artificial Sequence
  Cyclic GFR-binding peptide
IVNNSSDFYLVSIANLK

SEQ ID NO: 4343 - protein, 27 aa, Artificial Sequence
  Cyclic GFR-binding peptide
  MOD_RES (21)..(22): Xaa is C or S
VVKENEDFYLMSIANLETPVXXAKPIK

SEQ ID NO: 4344 - protein, 14 aa, Artificial Sequence
  Cyclic GFR-binding peptide
  MOD_RES (14)..(14): Xaa is C or S
FYLISIANLAQPVX

SEQ ID NO: 4345 - protein, 15 aa, Artificial Sequence
  Cyclic GFR-binding peptide
IVNSSDDIYLVSIPS

SEQ ID NO: 4346 - protein, 27 aa, Artificial Sequence
  Cyclic GFR-binding peptide
  MOD_RES (21)..(22): Xaa is C or S
VKPTRGVFYLISIANLDQPVXXPSASA

SEQ ID NO: 4347 - protein, 17 aa, Artificial Sequence
  Cyclic GFR-binding peptide
  MOD_RES (14)..(15): Xaa is C or S
IYLISIPSLDQSVXXPS

SEQ ID NO: 4348 - protein, 20 aa, Artificial Sequence
  Cyclic GFR-binding peptide
  MOD_RES (14)..(15): Xaa is C or S
KYLISIPSLKTPVXXAKSAK

SEQ ID NO: 4349 - protein, 20 aa, Artificial Sequence
  Cyclic GFR-binding peptide
  MOD_RES (14)..(15): Xaa is C or S
IYLISIPSLKTPVXXAKSAK

SEQ ID NO: 4350 - protein, 15 aa, Artificial Sequence
  Cyclic GFR-binding peptide
  MOD_RES (14)..(15): Xaa is C or S
KYLVSIPSLKTPAXX

SEQ ID NO: 4351 - protein, 16 aa, Artificial Sequence
  Cyclic GFR-binding peptide
VVNNAADKYLISIPSL

SEQ ID NO: 4352 - protein, 13 aa, Artificial Sequence
  Cyclic GFR-binding peptide
LYLISIPELRAPV

SEQ ID NO: 4353 - protein, 15 aa, Artificial Sequence
  Cyclic GFR-binding peptide
  MOD_RES (14)..(15): Xaa is C or S
IYLVSIPSLKTPAXX

SEQ ID NO: 4354 - protein, 17 aa, Artificial Sequence
  Cyclic GFR-binding peptide
IKPTKGIFYLISIANLD

SEQ ID NO: 4355 - protein, 20 aa, Artificial Sequence
  Cyclic GFR-binding peptide
  MOD_RES (14)..(15): Xaa is C or S
FYLISIANLRAPVXXSAPAA

SEQ ID NO: 4356 - protein, 19 aa, Artificial Sequence
  Cyclic GFR-binding peptide
  MOD_RES (14)..(15): Xaa is C or S
LYLISIPELRAPVXXSAPA

SEQ ID NO: 4357 - protein, 16 aa, Artificial Sequence
  Cyclic GFR-binding peptide
  MOD_RES (14)..(15): Xaa is C or S
KYLVSIPSLKTPAXXP

SEQ ID NO: 4358 - protein, 16 aa, Artificial Sequence
  Cyclic GFR-binding peptide
  MOD_RES (14)..(15): Xaa is C or S
IYLVSIPSLKTPAXXP

SEQ ID NO: 4359 - protein, 17 aa, Artificial Sequence
  Cyclic GFR-binding peptide
VVNNAADIYLISIPSLR

SEQ ID NO: 4360 - protein, 19 aa, Artificial Sequence
  Cyclic GFR-binding peptide
  MOD_RES (14)..(15): Xaa is C or S
IYLISIPSLAQPVXXPAAS

SEQ ID NO: 4361 - protein, 19 aa, Artificial Sequence
  Cyclic GFR-binding peptide
  MOD_RES (14)..(15): Xaa is C or S
KYLISIPSLAQPVXXPAAS

SEQ ID NO: 4362 - protein, 18 aa, Artificial Sequence
  Cyclic GFR-binding peptide
  MOD_RES (14)..(15): Xaa is C or S
LYLMSIPELETPVXXAKP

SEQ ID NO: 4363 - protein, 17 aa, Artificial Sequence
  Cyclic GFR-binding peptide
VKPTRGVIYLISIPSLD

SEQ ID NO: 4364 - protein, 18 aa, Artificial Sequence
  Cyclic GFR-binding peptide
  MOD_RES (14)..(15): Xaa is C or S
LYLISIPELDQSVXXPSA

SEQ ID NO: 4365 - protein, 19 aa, Artificial Sequence
  Cyclic GFR-binding peptide
VVNNAADIYLISIPSLRAP

SEQ ID NO: 4366 - protein, 13 aa, Artificial Sequence
  Cyclic GFR-binding peptide
IYLISIPSLDQPV

SEQ ID NO: 4367 - protein, 19 aa, Artificial Sequence
  Cyclic GFR-binding peptide
  MOD_RES (14)..(15): Xaa is C or S
IYLMSIPSLETPVXXAKPI

SEQ ID NO: 4368 - protein, 19 aa, Artificial Sequence
  Cyclic GFR-binding peptide
IVNNSSDLYLVSIPELKTP

SEQ ID NO: 4369 - protein, 19 aa, Artificial Sequence
  Cyclic GFR-binding peptide
  MOD_RES (14)..(15): Xaa is C or S
FYLISIANLAQPVXXPAAS

SEQ ID NO: 4370 - protein, 13 aa, Artificial Sequence
  Cyclic GFR-binding peptide
KYLISIPSLDQPV

SEQ ID NO: 4371 - protein, 19 aa, Artificial Sequence
  Cyclic GFR-binding peptide
  MOD_RES (14)..(15): Xaa is C or S
KYLMSIPSLETPVXXAKPI

SEQ ID NO: 4372 - protein, 16 aa, Artificial Sequence
  Cyclic GFR-binding peptide
IKPTKGIKYLISIPSL

SEQ ID NO: 4373 - protein, 27 aa, Artificial Sequence
  Cyclic GFR-binding peptide
  MOD_RES (21)..(22): Xaa is C or S
IKPTKGILYLISIPELDQSVXXPSASA

SEQ ID NO: 4374 - protein, 17 aa, Artificial Sequence
  Cyclic GFR-binding peptide
  MOD_RES (14)..(15): Xaa is C or S
KYLISIPSLRAPVXXSA

SEQ ID NO: 4375 - protein, 14 aa, Artificial Sequence
  Cyclic GFR-binding peptide
  MOD_RES (14)..(14): Xaa is C or S
IYLVSIPSLQTPAX

SEQ ID NO: 4376 - protein, 14 aa, Artificial Sequence
  Cyclic GFR-binding peptide
  MOD_RES (14)..(14): Xaa is C or S
KYLVSIPSLQTPAX

SEQ ID NO: 4377 - protein, 15 aa, Artificial Sequence
  Cyclic GFR-binding peptide
VKPTRGVKYLISIPS

SEQ ID NO: 4378 - protein, 15 aa, Artificial Sequence
  Cyclic GFR-binding peptide
  MOD_RES (14)..(14): Xaa is C or S
FYLVSIANLKTPAXT

SEQ ID NO: 4379 - protein, 20 aa, Artificial Sequence
  Cyclic GFR-binding peptide
  MOD_RES (14)..(14): Xaa is C or S
FYLVSIANLKTPAXTPKTVH

SEQ ID NO: 4380 - protein, 17 aa, Artificial Sequence
  Cyclic GFR-binding peptide
VVKENEDIYLMSIPSLE

SEQ ID NO: 4381 - protein, 16 aa, Artificial Sequence
  Cyclic GFR-binding peptide
  MOD_RES (14)..(15): Xaa is C or S
IYLMSIPSLETPVXXA

SEQ ID NO: 4382 - protein, 15 aa, Artificial Sequence
  Cyclic GFR-binding peptide
  MOD_RES (14)..(15): Xaa is C or S
IYLVSIPSLKTPVXX

SEQ ID NO: 4383 - protein, 16 aa, Artificial Sequence
  Cyclic GFR-binding peptide
  MOD_RES (14)..(15): Xaa is C or S
KYLMSIPSLETPVXXA

SEQ ID NO: 4384 - protein, 16 aa, Artificial Sequence
  Cyclic GFR-binding peptide
VVKDYEDFYLMSIANL

SEQ ID NO: 4385 - protein, 19 aa, Artificial Sequence
  Cyclic GFR-binding peptide
TPVGMDDFYLVSIANLKTP

SEQ ID NO: 4386 - protein, 18 aa, Artificial Sequence
  Cyclic GFR-binding peptide
VVKENEDKYLMSIPSLET

SEQ ID NO: 4387 - protein, 15 aa, Artificial Sequence
  Cyclic GFR-binding peptide
YTVVGKDKYLISIPS

SEQ ID NO: 4388 - protein, 15 aa, Artificial Sequence
  Cyclic GFR-binding peptide
TPVGMDDIYLVSIPS

SEQ ID NO: 4389 - protein, 19 aa, Artificial Sequence
  Cyclic GFR-binding peptide
IKPTKGILYLISIPELDQS

SEQ ID NO: 4390 - protein, 16 aa, Artificial Sequence
  Cyclic GFR-binding peptide
  MOD_RES (14)..(15): Xaa is C or S
FYLVSIANLKTPAXXP

SEQ ID NO: 4391 - protein, 18 aa, Artificial Sequence
  Cyclic GFR-binding peptide
VVKDYEDIYLMSIPSLET

SEQ ID NO: 4392 - protein, 15 aa, Artificial Sequence
  Cyclic GFR-binding peptide
VKPKRGVLYLISIPE

SEQ ID NO: 4393 - protein, 13 aa, Artificial Sequence
  Cyclic GFR-binding peptide
KYLMSIPSLETPV

SEQ ID NO: 4394 - protein, 16 aa, Artificial Sequence
  Cyclic GFR-binding peptide
VKPTRGVFYLISIANL

SEQ ID NO: 4395 - protein, 27 aa, Artificial Sequence
  Cyclic GFR-binding peptide
  MOD_RES (21)..(21): Xaa is C or S
IVNSSDDKYLVSIPSLKTPAXTPKTVH

SEQ ID NO: 4396 - protein, 13 aa, Artificial Sequence
  Cyclic GFR-binding peptide
FYLVSIANLKTPV

SEQ ID NO: 4397 - protein, 17 aa, Artificial Sequence
  Cyclic GFR-binding peptide
VVKDYEDFYLMSIANLE

SEQ ID NO: 4398 - protein, 14 aa, Artificial Sequence
  Cyclic GFR-binding peptide
  MOD_RES (14)..(14): Xaa is C or S
KYLISIPSLDQSVX

SEQ ID NO: 4399 - protein, 19 aa, Artificial Sequence
  Cyclic GFR-binding peptide
  MOD_RES (14)..(15): Xaa is C or S
FYLVSIANLKTPAXXAKPV

SEQ ID NO: 4400 - protein, 14 aa, Artificial Sequence
  Cyclic GFR-binding peptide
  MOD_RES (14)..(14): Xaa is C or S
IYLISIPSLDQSVX

SEQ ID NO: 4401 - protein, 18 aa, Artificial Sequence
  Cyclic GFR-binding peptide
VKPTRGVKYLISIPSLDQ

SEQ ID NO: 4402 - protein, 13 aa, Artificial Sequence
  Cyclic GFR-binding peptide
IYLMSIPSLETPV

SEQ ID NO: 4403 - protein, 27 aa, Artificial Sequence
  Cyclic GFR-binding peptide
  MOD_RES (21)..(22): Xaa is C or S
IVNSSDDFYLVSIANLQTPAXXPKPVT

SEQ ID NO: 4404 - protein, 27 aa, Artificial Sequence
  Cyclic GFR-binding peptide
  MOD_RES (21)..(22): Xaa is C or S
VVKDYEDIYLMSIPSLETPVXXAKPIS

SEQ ID NO: 4405 - protein, 15 aa, Artificial Sequence
  Cyclic GFR-binding peptide
IVNNSSDKYLVSIPS

SEQ ID NO: 4406 - protein, 18 aa, Artificial Sequence
  Cyclic GFR-binding peptide
VKPKRGVLYLISIPELAQ

SEQ ID NO: 4407 - protein, 16 aa, Artificial Sequence
  Cyclic GFR-binding peptide
IKPTKGILYLISIPEL

SEQ ID NO: 4408 - protein, 19 aa, Artificial Sequence
  Cyclic GFR-binding peptide
  MOD_RES (14)..(15): Xaa is C or S
FYLMSIANLETPVXXAKPI

SEQ ID NO: 4409 - protein, 18 aa, Artificial Sequence
  Cyclic GFR-binding peptide
  MOD_RES (14)..(15): Xaa is C or S
LYLVSIPELKTPAXXPKP

SEQ ID NO: 4410 - protein, 20 aa, Artificial Sequence
  Cyclic GFR-binding peptide
  MOD_RES (14)..(15): Xaa is C or S
IYLMSIPSLETPVXXAKPIS

SEQ ID NO: 4411 - protein, 15 aa, Artificial Sequence
  Cyclic GFR-binding peptide
VVKDYEDKYLMSIPS

SEQ ID NO: 4412 - protein, 27 aa, Artificial Sequence
  Cyclic GFR-binding peptide
  MOD_RES (21)..(22): Xaa is C or S
IVNSSDDFYLVSIANLKTPAXXPKPVY

SEQ ID NO: 4413 - protein, 20 aa, Artificial Sequence
  Cyclic GFR-binding peptide
  MOD_RES (14)..(15): Xaa is C or S
KYLMSIPSLETPVXXAKPIS

SEQ ID NO: 4414 - protein, 19 aa, Artificial Sequence
  Cyclic GFR-binding peptide
  MOD_RES (14)..(15): Xaa is C or S
FYLISIANLDQPVXXPSAS

SEQ ID NO: 4415 - protein, 13 aa, Artificial Sequence
  Cyclic GFR-binding peptide
IYLVSIPSLKTPV

SEQ ID NO: 4416 - protein, 18 aa, Artificial Sequence
  Cyclic GFR-binding peptide
IVNNSSDIYLVSIPSLKT

SEQ ID NO: 4417 - protein, 20 aa, Artificial Sequence
  Cyclic GFR-binding peptide
  MOD_RES (14)..(15): Xaa is C or S
FYLMSIANLETPVXXAKPIS

SEQ ID NO: 4418 - protein, 18 aa, Artificial Sequence
  Cyclic GFR-binding peptide
TPVGMDDKYLVSIPSLKT

SEQ ID NO: 4419 - protein, 17 aa, Artificial Sequence
  Cyclic GFR-binding peptide
YTVVGKDFYLISIANLK

SEQ ID NO: 4420 - protein, 19 aa, Artificial Sequence
  Cyclic GFR-binding peptide
  MOD_RES (14)..(15): Xaa is C or S
KYLVSIPSLKTPAXXAKPV

SEQ ID NO: 4421 - protein, 19 aa, Artificial Sequence
  Cyclic GFR-binding peptide
  MOD_RES (14)..(15): Xaa is C or S
IYLVSIPSLKTPAXXAKPV

SEQ ID NO: 4422 - protein, 20 aa, Artificial Sequence
  Cyclic GFR-binding peptide
  MOD_RES (14)..(15): Xaa is C or S
FYLVSIANLKTPAXXPKPVY

SEQ ID NO: 4423 - protein, 18 aa, Artificial Sequence
  Cyclic GFR-binding peptide
  MOD_RES (14)..(15): Xaa is C or S
LYLVSIPELKTPVXXAKG

SEQ ID NO: 4424 - protein, 16 aa, Artificial Sequence
  Cyclic GFR-binding peptide
  MOD_RES (14)..(15): Xaa is C or S
FYLMSIANLETPVXXA

SEQ ID NO: 4425 - protein, 19 aa, Artificial Sequence
  Cyclic GFR-binding peptide
  MOD_RES (14)..(15): Xaa is C or S
IYLISIPSLDQPVXXPSAS

SEQ ID NO: 4426 - protein, 16 aa, Artificial Sequence
  Cyclic GFR-binding peptide
  MOD_RES (14)..(15): Xaa is C or S
IYLISIPSLKTPVXXA

SEQ ID NO: 4427 - protein, 19 aa, Artificial Sequence
  Cyclic GFR-binding peptide
  MOD_RES (14)..(15): Xaa is C or S
KYLISIPSLDQPVXXPSAS

SEQ ID NO: 4428 - protein, 18 aa, Artificial Sequence
  Cyclic GFR-binding peptide
VVKENEDLYLMSIPELET

SEQ ID NO: 4429 - protein, 20 aa, Artificial Sequence
  Cyclic GFR-binding peptide
  MOD_RES (14)..(15): Xaa is C or S
FYLISIANLKTPVXXAKSAK

SEQ ID NO: 4430 - protein, 19 aa, Artificial Sequence
  Cyclic GFR-binding peptide
IKPTKGIKYLISIPSLDQS

SEQ ID NO: 4431 - protein, 16 aa, Artificial Sequence
  Cyclic GFR-binding peptide
  MOD_RES (14)..(15): Xaa is C or S
KYLISIPSLKTPVXXA

SEQ ID NO: 4432 - protein, 18 aa, Artificial Sequence
  Cyclic GFR-binding peptide
VKPTRGVFYLISIANLDQ

SEQ ID NO: 4433 - protein, 20 aa, Artificial Sequence
  Cyclic GFR-binding peptide
  MOD_RES (14)..(15): Xaa is C or S
IYLVSIPSLKTPAXXPKPVY

SEQ ID NO: 4434 - protein, 17 aa, Artificial Sequence
  Cyclic GFR-binding peptide
VVKDYEDKYLMSIPSLE

SEQ ID NO: 4435 - protein, 20 aa, Artificial Sequence
  Cyclic GFR-binding peptide
  MOD_RES (14)..(15): Xaa is C or S
KYLVSIPSLKTPAXXPKPVY

SEQ ID NO: 4436 - protein, 18 aa, Artificial Sequence
  Cyclic GFR-binding peptide
YTVVGKDIYLISIPSLKT

SEQ ID NO: 4437 - protein, 16 aa, Artificial Sequence
  Cyclic GFR-binding peptide
IVNNSSDFYLVSIANL

SEQ ID NO: 4438 - protein, 13 aa, Artificial Sequence
  Cyclic GFR-binding peptide
LYLISIPELAQPV

SEQ ID NO: 4439 - protein, 15 aa, Artificial Sequence
  Cyclic GFR-binding peptide
VVKENEDIYLMSIPS

SEQ ID NO: 4440 - protein, 16 aa, Artificial Sequence
  Cyclic GFR-binding peptide
  MOD_RES (14)..(15): Xaa is C or S
FYLVSIANLKTPAXXA

SEQ ID NO: 4441 - protein, 16 aa, Artificial Sequence
  Cyclic GFR-binding peptide
  MOD_RES (14)..(15): Xaa is C or S
FYLISIANLKTPVXXA

SEQ ID NO: 4442 - protein, 16 aa, Artificial Sequence
  Cyclic GFR-binding peptide
VVKENEDIYLMSIPSL

SEQ ID NO: 4443 - protein, 19 aa, Artificial Sequence
  Cyclic GFR-binding peptide
VKPTRGVFYLISIANLDQP

SEQ ID NO: 4444 - protein, 15 aa, Artificial Sequence
  Cyclic GFR-binding peptide
  MOD_RES (14)..(15): Xaa is C or S
LYLISIPELRAPVXX

SEQ ID NO: 4445 - protein, 15 aa, Artificial Sequence
  Cyclic GFR-binding peptide
VVKDYEDLYLMSIPE

SEQ ID NO: 4446 - protein, 15 aa, Artificial Sequence
  Cyclic GFR-binding peptide
  MOD_RES (14)..(15): Xaa is C or S
FYLVSIANLKTPVXX

SEQ ID NO: 4447 - protein, 16 aa, Artificial Sequence
  Cyclic GFR-binding peptide
  MOD_RES (14)..(14): Xaa is C or S
FYLVSIANLKTPAXTP

SEQ ID NO: 4448 - protein, 18 aa, Artificial Sequence
  Cyclic GFR-binding peptide
  MOD_RES (14)..(15): Xaa is C or S
LYLVSIPELKTPAXXAKP

SEQ ID NO: 4449 - protein, 19 aa, Artificial Sequence
  Cyclic GFR-binding peptide
  MOD_RES (14)..(15): Xaa is C or S
KYLISIPSLKTPVXXAKSA

SEQ ID NO: 4450 - protein, 19 aa, Artificial Sequence
  Cyclic GFR-binding peptide
  MOD_RES (14)..(15): Xaa is C or S
IYLISIPSLKTPVXXAKSA

SEQ ID NO: 4451 - protein, 17 aa, Artificial Sequence
  Cyclic GFR-binding peptide
  MOD_RES (14)..(15): Xaa is C or S
FYLISIANLRAPVXXSA

SEQ ID NO: 4452 - protein, 17 aa, Artificial Sequence
  Cyclic GFR-binding peptide
IKPTKGIKYLISIPSLD

SEQ ID NO: 4453 - protein, 27 aa, Artificial Sequence
  Cyclic GFR-binding peptide
  MOD_RES (21)..(22): Xaa is C or S
YTVVGKDIYLISIPSLKTPVXXAKSAK

SEQ ID NO: 4454 - protein, 19 aa, Artificial Sequence
  Cyclic GFR-binding peptide
  MOD_RES (14)..(15): Xaa is C or S
KYLVSIPSLQTPAXXPKPV

SEQ ID NO: 4455 - protein, 19 aa, Artificial Sequence
  Cyclic GFR-binding peptide
  MOD_RES (14)..(15): Xaa is C or S
IYLVSIPSLQTPAXXPKPV

SEQ ID NO: 4456 - protein, 19 aa, Artificial Sequence
  Cyclic GFR-binding peptide
  MOD_RES (14)..(15): Xaa is C or S
FYLVSIANLKTPAXXPKPV

SEQ ID NO: 4457 - protein, 19 aa, Artificial Sequence
  Cyclic GFR-binding peptide
  MOD_RES (14)..(15): Xaa is C or S
FYLISIANLKTPVXXAKSA

SEQ ID NO: 4458 - protein, 18 aa, Artificial Sequence
  Cyclic GFR-binding peptide
  MOD_RES (14)..(15): Xaa is C or S
FYLISIANLAQPVXXPAA

SEQ ID NO: 4459 - protein, 16 aa, Artificial Sequence
  Cyclic GFR-binding peptide
  MOD_RES (14)..(15): Xaa is C or S
KYLVSIPSLKTPAXXA

SEQ ID NO: 4460 - protein, 16 aa, Artificial Sequence
  Cyclic GFR-binding peptide
  MOD_RES (14)..(14): Xaa is C or S
KYLVSIPSLKTPAXTP

SEQ ID NO: 4461 - protein, 16 aa, Artificial Sequence
  Cyclic GFR-binding peptide
  MOD_RES (14)..(15): Xaa is C or S
IYLVSIPSLKTPAXXA

SEQ ID NO: 4462 - protein, 18 aa, Artificial Sequence
  Cyclic GFR-binding peptide
IVNSSDDKYLVSIPSLQT

SEQ ID NO: 4463 - protein, 15 aa, Artificial Sequence
  Cyclic GFR-binding peptide
  MOD_RES (14)..(15): Xaa is C or S
FYLISIANLDQSVXX

SEQ ID NO: 4464 - protein, 19 aa, Artificial Sequence
  Cyclic GFR-binding peptide
VKPKRGVFYLISIANLAQP

SEQ ID NO: 4465 - protein, 19 aa, Artificial Sequence
  Cyclic GFR-binding peptide
  MOD_RES (14)..(15): Xaa is C or S
KYLVSIPSLKTPAXXPKPV

SEQ ID NO: 4466 - protein, 19 aa, Artificial Sequence
  Cyclic GFR-binding peptide
  MOD_RES (14)..(15): Xaa is C or S
IYLVSIPSLKTPAXXPKPV

SEQ ID NO: 4467 - protein, 17 aa, Artificial Sequence
  Cyclic GFR-binding peptide
  MOD_RES (14)..(15): Xaa is C or S
IYLVSIPSLKTPVXXAK

SEQ ID NO: 4468 - protein, 16 aa, Artificial Sequence
  Cyclic GFR-binding peptide
  MOD_RES (14)..(14): Xaa is C or S
IYLVSIPSLKTPAXTP

SEQ ID NO: 4469 - protein, 17 aa, Artificial Sequence
  Cyclic GFR-binding peptide
  MOD_RES (14)..(14): Xaa is C or S
FYLVSIANLKTPAXTPK

SEQ ID NO: 4470 - protein, 19 aa, Artificial Sequence
  Cyclic GFR-binding peptide
IVNSSDDIYLVSIPSLKTP

SEQ ID NO: 4471 - protein, 17 aa, Artificial Sequence
  Cyclic GFR-binding peptide
VKPKRGVIYLISIPSLA

SEQ ID NO: 4472 - protein, 27 aa, Artificial Sequence
  Cyclic GFR-binding peptide
  MOD_RES (21)..(22): Xaa is C or S
TPVGMDDLYLVSIPELKTPVXXAKGVK

SEQ ID NO: 4473 - protein, 27 aa, Artificial Sequence
  Cyclic GFR-binding peptide
  MOD_RES (21)..(22): Xaa is C or S
VVNNAADFYLISIANLRAPVXXSAPAA

SEQ ID NO: 4474 - protein, 18 aa, Artificial Sequence
  Cyclic GFR-binding peptide
VKPTRGVLYLISIPELDQ

SEQ ID NO: 4475 - protein, 15 aa, Artificial Sequence
  Cyclic GFR-binding peptide
VVKDYEDFYLMSIAN

SEQ ID NO: 4476 - protein, 27 aa, Artificial Sequence
  Cyclic GFR-binding peptide
  MOD_RES (21)..(22): Xaa is C or S
IVNNSSDLYLVSIPELKTPAXXAKPVA

SEQ ID NO: 4477 - protein, 16 aa, Artificial Sequence
  Cyclic GFR-binding peptide
  MOD_RES (14)..(15): Xaa is C or S
IYLISIPSLDQPVXXP

SEQ ID NO: 4478 - protein, 16 aa, Artificial Sequence
  Cyclic GFR-binding peptide
TPVGMDDIYLVSIPSL

SEQ ID NO: 4479 - protein, 20 aa, Artificial Sequence
  Cyclic GFR-binding peptide
  MOD_RES (14)..(15): Xaa is C or S
FYLISIANLDQSVXXPSASA

SEQ ID NO: 4480 - protein, 16 aa, Artificial Sequence
  Cyclic GFR-binding peptide
IVNSSDDKYLVSIPSL

SEQ ID NO: 4481 - protein, 19 aa, Artificial Sequence
  Cyclic GFR-binding peptide
IVNSSDDIYLVSIPSLQTP

SEQ ID NO: 4482 - protein, 16 aa, Artificial Sequence
  Cyclic GFR-binding peptide
VKPKRGVKYLISIPSL

SEQ ID NO: 4483 - protein, 13 aa, Artificial Sequence
  Cyclic GFR-binding peptide
FYLISIANLDQSV

SEQ ID NO: 4484 - protein, 16 aa, Artificial Sequence
  Cyclic GFR-binding peptide
  MOD_RES (14)..(15): Xaa is C or S
KYLISIPSLDQPVXXP

SEQ ID NO: 4485 - protein, 15 aa, Artificial Sequence
  Cyclic GFR-binding peptide
  MOD_RES (14)..(15): Xaa is C or S
LYLISIPELAQPVXX

SEQ ID NO: 4486 - protein, 13 aa, Artificial Sequence
  Cyclic GFR-binding peptide
IYLISIPSLDQSV

SEQ ID NO: 4487 - protein, 15 aa, Artificial Sequence
  Cyclic GFR-binding peptide
  MOD_RES (14)..(15): Xaa is C or S
KYLISIPSLDQSVXX

SEQ ID NO: 4488 - protein, 27 aa, Artificial Sequence
  Cyclic GFR-binding peptide
  MOD_RES (21)..(22): Xaa is C or S
IVNSSDDKYLVSIPSLQTPAXXPKPVT

SEQ ID NO: 4489 - protein, 15 aa, Artificial Sequence
  Cyclic GFR-binding peptide
  MOD_RES (14)..(15): Xaa is C or S
IYLISIPSLDQSVXX

SEQ ID NO: 4490 - protein, 20 aa, Artificial Sequence
  Cyclic GFR-binding peptide
  MOD_RES (14)..(15): Xaa is C or S
IYLISIPSLDQSVXXPSASA

SEQ ID NO: 4491 - protein, 18 aa, Artificial Sequence
  Cyclic GFR-binding peptide
  MOD_RES (14)..(15): Xaa is C or S
FYLISIANLDQPVXXPSA

SEQ ID NO: 4492 - protein, 18 aa, Artificial Sequence
  Cyclic GFR-binding peptide
  MOD_RES (14)..(15): Xaa is C or S
KYLISIPSLRAPVXXSAP

SEQ ID NO: 4493 - protein, 20 aa, Artificial Sequence
  Cyclic GFR-binding peptide
  MOD_RES (14)..(15): Xaa is C or S
KYLISIPSLDQSVXXPSASA

SEQ ID NO: 4494 - protein, 17 aa, Artificial Sequence
  Cyclic GFR-binding peptide
TPVGMDDIYLVSIPSLK

SEQ ID NO: 4495 - protein, 17 aa, Artificial Sequence
  Cyclic GFR-binding peptide
  MOD_RES (14)..(14): Xaa is C or S
KYLVSIPSLKTPAXTPK

SEQ ID NO: 4496 - protein, 18 aa, Artificial Sequence
  Cyclic GFR-binding peptide
IVNSSDDKYLVSIPSLKT

SEQ ID NO: 4497 - protein, 15 aa, Artificial Sequence
  Cyclic GFR-binding peptide
IKPTKGILYLISIPE

SEQ ID NO: 4498 - protein, 17 aa, Artificial Sequence
  Cyclic GFR-binding peptide
  MOD_RES (14)..(14): Xaa is C or S
IYLVSIPSLKTPAXTPK

SEQ ID NO: 4499 - protein, 27 aa, Artificial Sequence
  Cyclic GFR-binding peptide
  MOD_RES (21)..(22): Xaa is C or S
VKPKRGVIYLISIPSLAQPVXXPAASA

SEQ ID NO: 4500 - protein, 13 aa, Artificial Sequence
  Cyclic GFR-binding peptide
KYLISIPSLDQSV

SEQ ID NO: 4501 - protein, 16 aa, Artificial Sequence
  Cyclic GFR-binding peptide
  MOD_RES (14)..(15): Xaa is C or S
FYLISIANLDQPVXXP

SEQ ID NO: 4502 - protein, 16 aa, Artificial Sequence
  Cyclic GFR-binding peptide
VVKDYEDIYLMSIPSL

SEQ ID NO: 4503 - protein, 19 aa, Artificial Sequence
  Cyclic GFR-binding peptide
TPVGMDDIYLVSIPSLKTP

SEQ ID NO: 4504 - protein, 20 aa, Artificial Sequence
  Cyclic GFR-binding peptide
  MOD_RES (14)..(15): Xaa is C or S
LYLVSIPELKTPAXXAKPVA

SEQ ID NO: 4505 - protein, 16 aa, Artificial Sequence
  Cyclic GFR-binding peptide
VVKDYEDKYLMSIPSL

SEQ ID NO: 4506 - protein, 16 aa, Artificial Sequence
  Cyclic GFR-binding peptide
VKPTRGVKYLISIPSL

SEQ ID NO: 4507 - protein, 15 aa, Artificial Sequence
  Cyclic GFR-binding peptide
  MOD_RES (14)..(15): Xaa is C or S
KYLISIPSLAQPVXX

SEQ ID NO: 4508 - protein, 18 aa, Artificial Sequence
  Cyclic GFR-binding peptide
IKPTKGIKYLISIPSLDQ

SEQ ID NO: 4509 - protein, 16 aa, Artificial Sequence
  Cyclic GFR-binding peptide
  MOD_RES (14)..(15): Xaa is C or S
KYLVSIPSLQTPAXXP

SEQ ID NO: 4510 - protein, 16 aa, Artificial Sequence
  Cyclic GFR-binding peptide
  MOD_RES (14)..(15): Xaa is C or S
IYLVSIPSLQTPAXXP

SEQ ID NO: 4511 - protein, 18 aa, Artificial Sequence
  Cyclic GFR-binding peptide
IKPTKGIIYLISIPSLDQ

SEQ ID NO: 4512 - protein, 18 aa, Artificial Sequence
  Cyclic GFR-binding peptide
  MOD_RES (14)..(15): Xaa is C or S
LYLISIPELAQPVXXPAA

SEQ ID NO: 4513 - protein, 15 aa, Artificial Sequence
  Cyclic GFR-binding peptide
  MOD_RES (14)..(15): Xaa is C or S
IYLISIPSLAQPVXX

SEQ ID NO: 4514 - protein, 15 aa, Artificial Sequence
  Cyclic GFR-binding peptide
TPVGMDDFYLVSIAN

SEQ ID NO: 4515 - protein, 15 aa, Artificial Sequence
  Cyclic GFR-binding peptide
  MOD_RES (14)..(15): Xaa is C or S
IYLISIPSLKTPVXX

SEQ ID NO: 4516 - protein, 15 aa, Artificial Sequence
  Cyclic GFR-binding peptide
  MOD_RES (14)..(15): Xaa is C or S
KYLISIPSLKTPVXX

SEQ ID NO: 4517 - protein, 18 aa, Artificial Sequence
  Cyclic GFR-binding peptide
VVKENEDFYLMSIANLET

SEQ ID NO: 4518 - protein, 19 aa, Artificial Sequence
  Cyclic GFR-binding peptide
  MOD_RES (14)..(15): Xaa is C or S
FYLISIANLDQSVXXPSAS

SEQ ID NO: 4519 - protein, 17 aa, Artificial Sequence
  Cyclic GFR-binding peptide
  MOD_RES (14)..(15): Xaa is C or S
LYLISIPELDQPVXXPS

SEQ ID NO: 4520 - protein, 19 aa, Artificial Sequence
  Cyclic GFR-binding peptide
IKPTKGIFYLISIANLDQS

SEQ ID NO: 4521 - protein, 16 aa, Artificial Sequence
  Cyclic GFR-binding peptide
VKPKRGVLYLISIPEL

SEQ ID NO: 4522 - protein, 18 aa, Artificial Sequence
  Cyclic GFR-binding peptide
VKPKRGVFYLISIANLAQ

SEQ ID NO: 4523 - protein, 16 aa, Artificial Sequence
  Cyclic GFR-binding peptide
IKPTKGIFYLISIANL

SEQ ID NO: 4524 - protein, 18 aa, Artificial Sequence
  Cyclic GFR-binding peptide
  MOD_RES (14)..(15): Xaa is C or S
KYLISIPSLAQPVXXPAA

SEQ ID NO: 4525 - protein, 18 aa, Artificial Sequence
  Cyclic GFR-binding peptide
IVNSSDDLYLVSIPELKT

SEQ ID NO: 4526 - protein, 14 aa, Artificial Sequence
  Cyclic GFR-binding peptide
  MOD_RES (14)..(14): Xaa is C or S
LYLISIPELRAPVX

SEQ ID NO: 4527 - protein, 19 aa, Artificial Sequence
  Cyclic GFR-binding peptide
VKPTRGVIYLISIPSLDQP

SEQ ID NO: 4528 - protein, 18 aa, Artificial Sequence
  Cyclic GFR-binding peptide
  MOD_RES (14)..(15): Xaa is C or S
IYLISIPSLAQPVXXPAA

SEQ ID NO: 4529 - protein, 27 aa, Artificial Sequence
  Cyclic GFR-binding peptide
  MOD_RES (21)..(22): Xaa is C or S
IVNSSDDLYLVSIPELQTPAXXPKPVT

SEQ ID NO: 4530 - protein, 14 aa, Artificial Sequence
  Cyclic GFR-binding peptide
  MOD_RES (14)..(14): Xaa is C or S
LYLMSIPELETPVX

SEQ ID NO: 4531 - protein, 16 aa, Artificial Sequence
  Cyclic GFR-binding peptide
  MOD_RES (14)..(15): Xaa is C or S
FYLISIANLAQPVXXP

SEQ ID NO: 4532 - protein, 18 aa, Artificial Sequence
  Cyclic GFR-binding peptide
VVNNAADKYLISIPSLRA

SEQ ID NO: 4533 - protein, 18 aa, Artificial Sequence
  Cyclic GFR-binding peptide
IVNSSDDLYLVSIPELQT

SEQ ID NO: 4534 - protein, 17 aa, Artificial Sequence
  Cyclic GFR-binding peptide
VVKDYEDLYLMSIPELE

SEQ ID NO: 4535 - protein, 16 aa, Artificial Sequence
  Cyclic GFR-binding peptide
  MOD_RES (14)..(15): Xaa is C or S
LYLISIPELDQSVXXP

SEQ ID NO: 4536 - protein, 14 aa, Artificial Sequence
  Cyclic GFR-binding peptide
  MOD_RES (14)..(14): Xaa is C or S
KYLVSIPSLKTPAX

SEQ ID NO: 4537 - protein, 14 aa, Artificial Sequence
  Cyclic GFR-binding peptide
  MOD_RES (14)..(14): Xaa is C or S
IYLVSIPSLKTPAX

SEQ ID NO: 4538 - protein, 16 aa, Artificial Sequence
  Cyclic GFR-binding peptide
  MOD_RES (14)..(15): Xaa is C or S
LYLISIPELAQPVXXP

SEQ ID NO: 4539 - protein, 18 aa, Artificial Sequence
  Cyclic GFR-binding peptide
  MOD_RES (14)..(15): Xaa is C or S
IYLVSIPSLQTPAXXPKP

SEQ ID NO: 4540 - protein, 15 aa, Artificial Sequence
  Cyclic GFR-binding peptide
VKPKRGVKYLISIPS

SEQ ID NO: 4541 - protein, 20 aa, Artificial Sequence
  Cyclic GFR-binding peptide
  MOD_RES (14)..(15): Xaa is C or S
LYLISIPELDQPVXXPSASA

SEQ ID NO: 4542 - protein, 20 aa, Artificial Sequence
  Cyclic GFR-binding peptide
  MOD_RES (14)..(15): Xaa is C or S
FYLVSIANLKTPVXXAKGVK

SEQ ID NO: 4543 - protein, 18 aa, Artificial Sequence
  Cyclic GFR-binding peptide
  MOD_RES (14)..(15): Xaa is C or S
KYLVSIPSLQTPAXXPKP

SEQ ID NO: 4544 - protein, 13 aa, Artificial Sequence
  Cyclic GFR-binding peptide
IYLVSIPSLQTPA

SEQ ID NO: 4545 - protein, 13 aa, Artificial Sequence
  Cyclic GFR-binding peptide
KYLVSIPSLQTPA

SEQ ID NO: 4546 - protein, 27 aa, Artificial Sequence
  Cyclic GFR-binding peptide
  MOD_RES (21)..(22): Xaa is C or S
VKPTRGVKYLISIPSLDQPVXXPSASA

SEQ ID NO: 4547 - protein, 15 aa, Artificial Sequence
  Cyclic GFR-binding peptide
VVNNAADIYLISIPS

SEQ ID NO: 4548 - protein, 13 aa, Artificial Sequence
  Cyclic GFR-binding peptide
IYLISIPSLKTPV

SEQ ID NO: 4549 - protein, 13 aa, Artificial Sequence
  Cyclic GFR-binding peptide
KYLISIPSLKTPV

SEQ ID NO: 4550 - protein, 14 aa, Artificial Sequence
  Cyclic GFR-binding peptide
  MOD_RES (14)..(14): Xaa is C or S
LYLVSIPELKTPVX

SEQ ID NO: 4551 - protein, 19 aa, Artificial Sequence
  Cyclic GFR-binding peptide
VVKENEDIYLMSIPSLETP

SEQ ID NO: 4552 - protein, 19 aa, Artificial Sequence
  Cyclic GFR-binding peptide
IVNNSSDKYLVSIPSLKTP

SEQ ID NO: 4553 - protein, 27 aa, Artificial Sequence
  Cyclic GFR-binding peptide
  MOD_RES (21)..(22): Xaa is C or S
YTVVGKDFYLISIANLKTPVXXAKSAK

SEQ ID NO: 4554 - protein, 19 aa, Artificial Sequence
  Cyclic GFR-binding peptide
VVKDYEDKYLMSIPSLETP

SEQ ID NO: 4555 - protein, 16 aa, Artificial Sequence
  Cyclic GFR-binding peptide
  MOD_RES (14)..(15): Xaa is C or S
LYLVSIPELKTPAXXA

SEQ ID NO: 4556 - protein, 17 aa, Artificial Sequence
  Cyclic GFR-binding peptide
  MOD_RES (14)..(15): Xaa is C or S
KYLVSIPSLKTPAXXAK

SEQ ID NO: 4557 - protein, 17 aa, Artificial Sequence
  Cyclic GFR-binding peptide
  MOD_RES (14)..(15): Xaa is C or S
IYLVSIPSLKTPAXXAK

SEQ ID NO: 4558 - protein, 13 aa, Artificial Sequence
  Cyclic GFR-binding peptide
IYLISIPSLAQPV

SEQ ID NO: 4559 - protein, 13 aa, Artificial Sequence
  Cyclic GFR-binding peptide
KYLISIPSLAQPV

SEQ ID NO: 4560 - protein, 15 aa, Artificial Sequence
  Cyclic GFR-binding peptide
  MOD_RES (14)..(15): Xaa is C or S
IYLVSIPSLQTPAXX

SEQ ID NO: 4561 - protein, 15 aa, Artificial Sequence
  Cyclic GFR-binding peptide
  MOD_RES (14)..(15): Xaa is C or S
KYLVSIPSLQTPAXX

SEQ ID NO: 4562 - protein, 17 aa, Artificial Sequence
  Cyclic GFR-binding peptide
VVNNAADLYLISIPELR

SEQ ID NO: 4563 - protein, 15 aa, Artificial Sequence
  Cyclic GFR-binding peptide
  MOD_RES (14)..(15): Xaa is C or S
FYLMSIANLETPVXX

SEQ ID NO: 4564 - protein, 16 aa, Artificial Sequence
  Cyclic GFR-binding peptide
YTVVGKDFYLISIANL

SEQ ID NO: 4565 - protein, 27 aa, Artificial Sequence
  Cyclic GFR-binding peptide
  MOD_RES (21)..(22): Xaa is C or S
IVNSSDDIYLVSIPSLKTPAXXPKPVY

SEQ ID NO: 4566 - protein, 15 aa, Artificial Sequence
  Cyclic GFR-binding peptide
  MOD_RES (14)..(15): Xaa is C or S
LYLISIPELDQSVXX

SEQ ID NO: 4567 - protein, 14 aa, Artificial Sequence
  Cyclic GFR-binding peptide
  MOD_RES (14)..(14): Xaa is C or S
IYLISIPSLDQPVX

SEQ ID NO: 4568 - protein, 13 aa, Artificial Sequence
  Cyclic GFR-binding peptide
LYLISIPELDQSV

SEQ ID NO: 4569 - protein, 14 aa, Artificial Sequence
  Cyclic GFR-binding peptide
  MOD_RES (14)..(14): Xaa is C or S
KYLISIPSLDQPVX

SEQ ID NO: 4570 - protein, 18 aa, Artificial Sequence
  Cyclic GFR-binding peptide
  MOD_RES (14)..(15): Xaa is C or S
LYLISIPELRAPVXXSAP

SEQ ID NO: 4571 - protein, 19 aa, Artificial Sequence
  Cyclic GFR-binding peptide
  MOD_RES (14)..(14): Xaa is C or S
IYLVSIPSLKTPAXTPKTV

SEQ ID NO: 4572 - protein, 19 aa, Artificial Sequence
  Cyclic GFR-binding peptide
  MOD_RES (14)..(14): Xaa is C or S
KYLVSIPSLKTPAXTPKTV

SEQ ID NO: 4573 - protein, 27 aa, Artificial Sequence
  Cyclic GFR-binding peptide
  MOD_RES (21)..(22): Xaa is C or S
IVNSSDDIYLVSIPSLQTPAXXPKPVT

SEQ ID NO: 4574 - protein, 18 aa, Artificial Sequence
  Cyclic GFR-binding peptide
  MOD_RES (14)..(14): Xaa is C or S
IYLVSIPSLKTPAXTPKT

SEQ ID NO: 4575 - protein, 17 aa, Artificial Sequence
  Cyclic GFR-binding peptide
VVKDYEDIYLMSIPSLE

SEQ ID NO: 4576 - protein, 19 aa, Artificial Sequence
  Cyclic GFR-binding peptide
VKPKRGVIYLISIPSLAQP

SEQ ID NO: 4577 - protein, 18 aa, Artificial Sequence
  Cyclic GFR-binding peptide
IVNSSDDFYLVSIANLQT

SEQ ID NO: 4578 - protein, 18 aa, Artificial Sequence
  Cyclic GFR-binding peptide
  MOD_RES (14)..(15): Xaa is C or S
KYLVSIPSLKTPAXXAKP

SEQ ID NO: 4579 - protein, 18 aa, Artificial Sequence
  Cyclic GFR-binding peptide
  MOD_RES (14)..(15): Xaa is C or S
IYLVSIPSLKTPAXXAKP

SEQ ID NO: 4580 - protein, 15 aa, Artificial Sequence
  Cyclic GFR-binding peptide
  MOD_RES (14)..(15): Xaa is C or S
IYLISIPSLDQPVXX

SEQ ID NO: 4581 - protein, 15 aa, Artificial Sequence
  Cyclic GFR-binding peptide
  MOD_RES (14)..(15): Xaa is C or S
KYLISIPSLDQPVXX

SEQ ID NO: 4582 - protein, 20 aa, Artificial Sequence
  Cyclic GFR-binding peptide
  MOD_RES (14)..(15): Xaa is C or S
IYLISIPSLAQPVXXPAASA

SEQ ID NO: 4583 - protein, 13 aa, Artificial Sequence
  Cyclic GFR-binding peptide
FYLMSIANLETPV

SEQ ID NO: 4584 - protein, 20 aa, Artificial Sequence
  Cyclic GFR-binding peptide
  MOD_RES (14)..(15): Xaa is C or S
KYLISIPSLAQPVXXPAASA

SEQ ID NO: 4585 - protein, 20 aa, Artificial Sequence
  Cyclic GFR-binding peptide
  MOD_RES (14)..(15): Xaa is C or S
KYLMSIPSLETPVXXAKPIK

SEQ ID NO: 4586 - protein, 16 aa, Artificial Sequence
  Cyclic GFR-binding peptide
VVKDYEDLYLMSIPEL

SEQ ID NO: 4587 - protein, 18 aa, Artificial Sequence
  Cyclic GFR-binding peptide
VVNNAADFYLISIANLRA

SEQ ID NO: 4588 - protein, 20 aa, Artificial Sequence
  Cyclic GFR-binding peptide
  MOD_RES (14)..(15): Xaa is C or S
IYLMSIPSLETPVXXAKPIK

SEQ ID NO: 4589 - protein, 16 aa, Artificial Sequence
  Cyclic GFR-binding peptide
  MOD_RES (14)..(15): Xaa is C or S
IYLVSIPSLKTPVXXA

SEQ ID NO: 4590 - protein, 18 aa, Artificial Sequence
  Cyclic GFR-binding peptide
IVNSSDDFYLVSIANLKT

SEQ ID NO: 4591 - protein, 18 aa, Artificial Sequence
  Cyclic GFR-binding peptide
  MOD_RES (14)..(15): Xaa is C or S
FYLISIANLKTPVXXAKS

SEQ ID NO: 4592 - protein, 27 aa, Artificial Sequence
  Cyclic GFR-binding peptide
  MOD_RES (21)..(22): Xaa is C or S
IVNNSSDIYLVSIPSLKTPAXXAKPVA

SEQ ID NO: 4593 - protein, 18 aa, Artificial Sequence
  Cyclic GFR-binding peptide
IKPTKGILYLISIPELDQ

SEQ ID NO: 4594 - protein, 18 aa, Artificial Sequence
  Cyclic GFR-binding peptide
TPVGMDDLYLVSIPELKT

SEQ ID NO: 4595 - protein, 19 aa, Artificial Sequence
  Cyclic GFR-binding peptide
  MOD_RES (14)..(15): Xaa is C or S
LYLISIPELDQSVXXPSAS

SEQ ID NO: 4596 - protein, 15 aa, Artificial Sequence
  Cyclic GFR-binding peptide
VVNNAADLYLISIPE

SEQ ID NO: 4597 - protein, 17 aa, Artificial Sequence
  Cyclic GFR-binding peptide
  MOD_RES (14)..(15): Xaa is C or S
IYLVSIPSLKTPAXXPK

SEQ ID NO: 4598 - protein, 17 aa, Artificial Sequence
  Cyclic GFR-binding peptide
  MOD_RES (14)..(15): Xaa is C or S
KYLVSIPSLKTPAXXPK

SEQ ID NO: 4599 - protein, 17 aa, Artificial Sequence
  Cyclic GFR-binding peptide
  MOD_RES (14)..(15): Xaa is C or S
IYLVSIPSLQTPAXXPK

SEQ ID NO: 4600 - protein, 17 aa, Artificial Sequence
  Cyclic GFR-binding peptide
  MOD_RES (14)..(15): Xaa is C or S
KYLVSIPSLQTPAXXPK

SEQ ID NO: 4601 - protein, 16 aa, Artificial Sequence
  Cyclic GFR-binding peptide
  MOD_RES (14)..(15): Xaa is C or S
FYLISIANLDQSVXXP

SEQ ID NO: 4602 - protein, 16 aa, Artificial Sequence
  Cyclic GFR-binding peptide
VKPKRGVFYLISIANL

SEQ ID NO: 4603 - protein, 14 aa, Artificial Sequence
  Cyclic GFR-binding peptide
  MOD_RES (14)..(14): Xaa is C or S
KYLISIPSLAQPVX

SEQ ID NO: 4604 - protein, 14 aa, Artificial Sequence
  Cyclic GFR-binding peptide
  MOD_RES (14)..(14): Xaa is C or S
FYLISIANLRAPVX

SEQ ID NO: 4605 - protein, 18 aa, Artificial Sequence
  Cyclic GFR-binding peptide
VKPKRGVKYLISIPSLAQ

SEQ ID NO: 4606 - protein, 19 aa, Artificial Sequence
  Cyclic GFR-binding peptide
YTVVGKDKYLISIPSLKTP

SEQ ID NO: 4607 - protein, 14 aa, Artificial Sequence
  Cyclic GFR-binding peptide
  MOD_RES (14)..(14): Xaa is C or S
FYLMSIANLETPVX

SEQ ID NO: 4608 - protein, 14 aa, Artificial Sequence
  Cyclic GFR-binding peptide
  MOD_RES (14)..(14): Xaa is C or S
IYLISIPSLAQPVX

SEQ ID NO: 4609 - protein, 27 aa, Artificial Sequence
  Cyclic GFR-binding peptide
  MOD_RES (21)..(22): Xaa is C or S
VVNNAADIYLISIPSLRAPVXXSAPAA

SEQ ID NO: 4610 - protein, 20 aa, Artificial Sequence
  Cyclic GFR-binding peptide
  MOD_RES (14)..(15): Xaa is C or S
FYLISIANLDQPVXXPSASA

SEQ ID NO: 4611 - protein, 27 aa, Artificial Sequence
  Cyclic GFR-binding peptide
  MOD_RES (21)..(22): Xaa is C or S
YTVVGKDKYLISIPSLKTPVXXAKSAK

SEQ ID NO: 4612 - protein, 19 aa, Artificial Sequence
  Cyclic GFR-binding peptide
  MOD_RES (14)..(15): Xaa is C or S
IYLVSIPSLKTPVXXAKGV

SEQ ID NO: 4613 - protein, 18 aa, Artificial Sequence
  Cyclic GFR-binding peptide
  MOD_RES (14)..(14): Xaa is C or S
KYLVSIPSLKTPAXTPKT

SEQ ID NO: 4614 - protein, 27 aa, Artificial Sequence
  Cyclic GFR-binding peptide
  MOD_RES (21)..(22): Xaa is C or S
TPVGMDDIYLVSIPSLKTPVXXAKGVK

SEQ ID NO: 4615 - protein, 18 aa, Artificial Sequence
  Cyclic GFR-binding peptide
  MOD_RES (14)..(15): Xaa is C or S
KYLVSIPSLKTPAXXPKP

SEQ ID NO: 4616 - protein, 14 aa, Artificial Sequence
  Cyclic GFR-binding peptide
  MOD_RES (14)..(14): Xaa is C or S
FYLVSIANLKTPVX

SEQ ID NO: 4617 - protein, 16 aa, Artificial Sequence
  Cyclic GFR-binding peptide
IVNNSSDKYLVSIPSL

SEQ ID NO: 4618 - protein, 27 aa, Artificial Sequence
  Cyclic GFR-binding peptide
  MOD_RES (21)..(22): Xaa is C or S
VVKENEDIYLMSIPSLETPVXXAKPIK

SEQ ID NO: 4619 - protein, 18 aa, Artificial Sequence
  Cyclic GFR-binding peptide
  MOD_RES (14)..(15): Xaa is C or S
IYLVSIPSLKTPAXXPKP

SEQ ID NO: 4620 - protein, 19 aa, Artificial Sequence
  Cyclic GFR-binding peptide
  MOD_RES (14)..(15): Xaa is C or S
LYLMSIPELETPVXXAKPI

SEQ ID NO: 4621 - protein, 15 aa, Artificial Sequence
  Cyclic GFR-binding peptide
VVKENEDFYLMSIAN

SEQ ID NO: 4622 - protein, 15 aa, Artificial Sequence
  Cyclic GFR-binding peptide
IKPTKGIKYLISIPS

SEQ ID NO: 4623 - protein, 19 aa, Artificial Sequence
  Cyclic GFR-binding peptide
VVKDYEDLYLMSIPELETP

SEQ ID NO: 4624 - protein, 18 aa, Artificial Sequence
  Cyclic GFR-binding peptide
IKPTKGIFYLISIANLDQ

SEQ ID NO: 4625 - protein, 16 aa, Artificial Sequence
  Cyclic GFR-binding peptide
IKPTKGIIYLISIPSL

SEQ ID NO: 4626 - protein, 20 aa, Artificial Sequence
  Cyclic GFR-binding peptide
  MOD_RES (14)..(14): Xaa is C or S
KYLVSIPSLKTPAXTPKTVH

SEQ ID NO: 4627 - protein, 13 aa, Artificial Sequence
  Cyclic GFR-binding peptide
KYLVSIPSLKTPA

SEQ ID NO: 4628 - protein, 20 aa, Artificial Sequence
  Cyclic GFR-binding peptide
  MOD_RES (14)..(14): Xaa is C or S
IYLVSIPSLKTPAXTPKTVH

SEQ ID NO: 4629 - protein, 13 aa, Artificial Sequence
  Cyclic GFR-binding peptide
IYLVSIPSLKTPA

SEQ ID NO: 4630 - protein, 18 aa, Artificial Sequence
  Cyclic GFR-binding peptide
TPVGMDDFYLVSIANLKT

SEQ ID NO: 4631 - protein, 17 aa, Artificial Sequence
  Cyclic GFR-binding peptide
YTVVGKDKYLISIPSLK

SEQ ID NO: 4632 - protein, 15 aa, Artificial Sequence
  Cyclic GFR-binding peptide
TPVGMDDLYLVSIPE

SEQ ID NO: 4633 - protein, 20 aa, Artificial Sequence
  Cyclic GFR-binding peptide
  MOD_RES (14)..(15): Xaa is C or S
LYLVSIPELKTPAXXPKPVY

SEQ ID NO: 4634 - protein, 17 aa, Artificial Sequence
  Cyclic GFR-binding peptide
  MOD_RES (14)..(15): Xaa is C or S
KYLISIPSLKTPVXXAK

SEQ ID NO: 4635 - protein, 17 aa, Artificial Sequence
  Cyclic GFR-binding peptide
  MOD_RES (14)..(15): Xaa is C or S
IYLISIPSLKTPVXXAK

SEQ ID NO: 4636 - protein, 16 aa, Artificial Sequence
  Cyclic GFR-binding peptide
YTVVGKDKYLISIPSL

SEQ ID NO: 4637 - protein, 17 aa, Artificial Sequence
  Cyclic GFR-binding peptide
IVNNSSDKYLVSIPSLK

SEQ ID NO: 4638 - protein, 17 aa, Artificial Sequence
  Cyclic GFR-binding peptide
  MOD_RES (14)..(15): Xaa is C or S
FYLISIANLDQSVXXPS

SEQ ID NO: 4639 - protein, 19 aa, Artificial Sequence
  Cyclic GFR-binding peptide
VVKDYEDFYLMSIANLETP

SEQ ID NO: 4640 - protein, 15 aa, Artificial Sequence
  Cyclic GFR-binding peptide
NAISILYFIGKTPKI

SEQ ID NO: 4641 - protein, 18 aa, Artificial Sequence
  Cyclic GFR-binding peptide
  MOD_RES (4)..(5): Xaa is C or S
PKAXXVPTELSPISMLYK

SEQ ID NO: 4642 - protein, 15 aa, Artificial Sequence
  Cyclic GFR-binding peptide
SPISVLYKDDSSNVI

SEQ ID NO: 4643 - protein, 27 aa, Artificial Sequence
  Cyclic GFR-binding peptide
  MOD_RES (6)..(7): Xaa is C or S
KVGKAXXVPTKLNAISVLYFDDMGVPT

SEQ ID NO: 4644 - protein, 18 aa, Artificial Sequence
  Cyclic GFR-binding peptide
  MOD_RES (4)..(5): Xaa is C or S
ASPXXVSQDLSPISILYI

SEQ ID NO: 4645 - protein, 18 aa, Artificial Sequence
  Cyclic GFR-binding peptide
  MOD_RES (4)..(5): Xaa is C or S
ASPXXVSQDLSPISILYK

SEQ ID NO: 4646 - protein, 13 aa, Artificial Sequence
  Cyclic GFR-binding peptide
VPQDLEPISILYL

SEQ ID NO: 4647 - protein, 14 aa, Artificial Sequence
  Cyclic GFR-binding peptide
  MOD_RES (1)..(1): Xaa is C or S
XVPTKLNAISILYF

SEQ ID NO: 4648 - protein, 13 aa, Artificial Sequence
  Cyclic GFR-binding peptide
VPTELEPISMLYL

SEQ ID NO: 4649 - protein, 15 aa, Artificial Sequence
  Cyclic GFR-binding peptide
  MOD_RES (1)..(2): Xaa is C or S
XXAPTKLEPISVLYL

SEQ ID NO: 4650 - protein, 19 aa, Artificial Sequence
  Cyclic GFR-binding peptide
  MOD_RES (5)..(6): Xaa is C or S
APASXXVPARLSPISILYK

SEQ ID NO: 4651 - protein, 15 aa, Artificial Sequence
  Cyclic GFR-binding peptide
EPISMLYLDENEKVV

SEQ ID NO: 4652 - protein, 14 aa, Artificial Sequence
  Cyclic GFR-binding peptide
  MOD_RES (1)..(1): Xaa is C or S
XVSQDLEPISILYL

SEQ ID NO: 4653 - protein, 17 aa, Artificial Sequence
  Cyclic GFR-binding peptide
RLSPISILYKDAANNVV

SEQ ID NO: 4654 - protein, 17 aa, Artificial Sequence
  Cyclic GFR-binding peptide
DLSPISILYKVGRTPKV

SEQ ID NO: 4655 - protein, 19 aa, Artificial Sequence
  Cyclic GFR-binding peptide
PARLSPISILYKDAANNVV

SEQ ID NO: 4656 - protein, 16 aa, Artificial Sequence
  Cyclic GFR-binding peptide
LNAISVLYFDDMGVPT

SEQ ID NO: 4657 - protein, 19 aa, Artificial Sequence
  Cyclic GFR-binding peptide
  MOD_RES (5)..(6): Xaa is C or S
VPKPXXAPTKLEPISVLYL

SEQ ID NO: 4658 - protein, 16 aa, Artificial Sequence
  Cyclic GFR-binding peptide
  MOD_RES (3)..(3): Xaa is C or S
PTXAPTKLEPISVLYL

SEQ ID NO: 4659 - protein, 17 aa, Artificial Sequence
  Cyclic GFR-binding peptide
  MOD_RES (3)..(4): Xaa is C or S
ASXXVPARLEPISILYL

SEQ ID NO: 4660 - protein, 19 aa, Artificial Sequence
  Cyclic GFR-binding peptide
PTKLEPISVLYLDDSSNVI

SEQ ID NO: 4661 - protein, 15 aa, Artificial Sequence
  Cyclic GFR-binding peptide
SPISILYIVGRTPKV

SEQ ID NO: 4662 - protein, 14 aa, Artificial Sequence
  Cyclic GFR-binding peptide
  MOD_RES (1)..(1): Xaa is C or S
XVPTKLSPISILYI

SEQ ID NO: 4663 - protein, 18 aa, Artificial Sequence
  Cyclic GFR-binding peptide
  MOD_RES (4)..(5): Xaa is C or S
PKAXXVPTELSPISMLYI

SEQ ID NO: 4664 - protein, 17 aa, Artificial Sequence
  Cyclic GFR-binding peptide
ELSPISMLYKDENEKVV

SEQ ID NO: 4665 - protein, 14 aa, Artificial Sequence
  Cyclic GFR-binding peptide
  MOD_RES (1)..(1): Xaa is C or S
XVPTKLSPISILYK

SEQ ID NO: 4666 - protein, 19 aa, Artificial Sequence
  Cyclic GFR-binding peptide
  MOD_RES (5)..(6): Xaa is C or S
VGKAXXVPTKLEPISVLYL

SEQ ID NO: 4667 - protein, 18 aa, Artificial Sequence
  Cyclic GFR-binding peptide
ARLEPISILYLDAANNVV

SEQ ID NO: 4668 - protein, 18 aa, Artificial Sequence
  Cyclic GFR-binding peptide
TKLNAISILYFDKGVVTY

SEQ ID NO: 4669 - protein, 16 aa, Artificial Sequence
  Cyclic GFR-binding peptide
  MOD_RES (2)..(3): Xaa is C or S
PXXVPQDLEPISILYL

SEQ ID NO: 4670 - protein, 18 aa, Artificial Sequence
  Cyclic GFR-binding peptide
  MOD_RES (4)..(5): Xaa is C or S
PKAXXAPTKLNAISVLYF

SEQ ID NO: 4671 - protein, 19 aa, Artificial Sequence
  Cyclic GFR-binding peptide
PQDLEPISILYLVGRTPKV

SEQ ID NO: 4672 - protein, 17 aa, Artificial Sequence
  Cyclic GFR-binding peptide
  MOD_RES (3)..(4): Xaa is C or S
SPXXVSQDLEPISILYL

SEQ ID NO: 4673 - protein, 16 aa, Artificial Sequence
  Cyclic GFR-binding peptide
  MOD_RES (2)..(3): Xaa is C or S
SXXVPARLNAISILYF

SEQ ID NO: 4674 - protein, 16 aa, Artificial Sequence
  Cyclic GFR-binding peptide
LSPISILYIVGRKPKV

SEQ ID NO: 4675 - protein, 18 aa, Artificial Sequence
  Cyclic GFR-binding peptide
TKLNAISVLYFDSSNNVI

SEQ ID NO: 4676 - protein, 16 aa, Artificial Sequence
  Cyclic GFR-binding peptide
LNAISMLYFDENEKVV

SEQ ID NO: 4677 - protein, 20 aa, Artificial Sequence
  Cyclic GFR-binding peptide
  MOD_RES (6)..(7): Xaa is C or S
ASASPXXVSQDLEPISILYL

SEQ ID NO: 4678 - protein, 19 aa, Artificial Sequence
  Cyclic GFR-binding peptide
  MOD_RES (5)..(6): Xaa is C or S
APASXXVPARLNAISILYF

SEQ ID NO: 4679 - protein, 16 aa, Artificial Sequence
  Cyclic GFR-binding peptide
LEPISILYLVGRTPKV

SEQ ID NO: 4680 - protein, 17 aa, Artificial Sequence
  Cyclic GFR-binding peptide
  MOD_RES (4)..(4): Xaa is C or S
KPTXAPTKLEPISVLYL

SEQ ID NO: 4681 - protein, 18 aa, Artificial Sequence
  Cyclic GFR-binding peptide
TQLSPISVLYIDDSSNVI

SEQ ID NO: 4682 - protein, 15 aa, Artificial Sequence
  Cyclic GFR-binding peptide
NAISILYFDAANNVV

SEQ ID NO: 4683 - protein, 18 aa, Artificial Sequence
  Cyclic GFR-binding peptide
TKLSPISVLYIDDSSNVI

SEQ ID NO: 4684 - protein, 17 aa, Artificial Sequence
  Cyclic GFR-binding peptide
ALEPISILYLVGRKPKV

SEQ ID NO: 4685 - protein, 16 aa, Artificial Sequence
  Cyclic GFR-binding peptide
  MOD_RES (2)..(3): Xaa is C or S
SXXVPARLSPISILYK

SEQ ID NO: 4686 - protein, 17 aa, Artificial Sequence
  Cyclic GFR-binding peptide
  MOD_RES (3)..(4): Xaa is C or S
KAXXAPTKLEPISVLYL

SEQ ID NO: 4687 - protein, 13 aa, Artificial Sequence
  Cyclic GFR-binding peptide
VPARLNAISILYF

SEQ ID NO: 4688 - protein, 15 aa, Artificial Sequence
  Cyclic GFR-binding peptide
SPISMLYKDENEKVV

SEQ ID NO: 4689 - protein, 15 aa, Artificial Sequence
  Cyclic GFR-binding peptide
NAISILYFVGRKPKV

SEQ ID NO: 4690 - protein, 20 aa, Artificial Sequence
  Cyclic GFR-binding peptide
  MOD_RES (6)..(7): Xaa is C or S
SIPKAXXVPTELEPISMLYL

SEQ ID NO: 4691 - protein, 20 aa, Artificial Sequence
  Cyclic GFR-binding peptide
  MOD_RES (6)..(7): Xaa is C or S
AAPASXXVPARLEPISILYL

SEQ ID NO: 4692 - protein, 20 aa, Artificial Sequence
  Cyclic GFR-binding peptide
  MOD_RES (7)..(7): Xaa is C or S
HVTKPTXAPTKLEPISVLYL

SEQ ID NO: 4693 - protein, 15 aa, Artificial Sequence
  Cyclic GFR-binding peptide
  MOD_RES (1)..(2): Xaa is C or S
XXVPARLSPISILYK

SEQ ID NO: 4694 - protein, 15 aa, Artificial Sequence
  Cyclic GFR-binding peptide
EPISVLYLDDSSNVI

SEQ ID NO: 4695 - protein, 15 aa, Artificial Sequence
  Cyclic GFR-binding peptide
  MOD_RES (1)..(2): Xaa is C or S
XXVPTELEPISMLYL

SEQ ID NO: 4696 - protein, 17 aa, Artificial Sequence
  Cyclic GFR-binding peptide
DLEPISILYLVGRTPKV

SEQ ID NO: 4697 - protein, 19 aa, Artificial Sequence
  Cyclic GFR-binding peptide
PARLNAISILYFDAANNVV

SEQ ID NO: 4698 - protein, 15 aa, Artificial Sequence
  Cyclic GFR-binding peptide
  MOD_RES (2)..(2): Xaa is C or S
TXAPTKLEPISVLYL

SEQ ID NO: 4699 - protein, 15 aa, Artificial Sequence
  Cyclic GFR-binding peptide
  MOD_RES (1)..(2): Xaa is C or S
XXVPQDLEPISILYL

SEQ ID NO: 4700 - protein, 17 aa, Artificial Sequence
  Cyclic GFR-binding peptide
  MOD_RES (3)..(4): Xaa is C or S
SPXXVPQDLNAISILYF

SEQ ID NO: 4701 - protein, 20 aa, Artificial Sequence
  Cyclic GFR-binding peptide
  MOD_RES (6)..(7): Xaa is C or S
AVPKAXXAPTKLNAISVLYF

SEQ ID NO: 4702 - protein, 18 aa, Artificial Sequence
  Cyclic GFR-binding peptide
QALSPISILYIVGRKPKV

SEQ ID NO: 4703 - protein, 19 aa, Artificial Sequence
  Cyclic GFR-binding peptide
PTKLEPISVLYLDDMGVPT

SEQ ID NO: 4704 - protein, 14 aa, Artificial Sequence
  Cyclic GFR-binding peptide
  MOD_RES (1)..(1): Xaa is C or S
XAPTQLEPISVLYL

SEQ ID NO: 4705 - protein, 17 aa, Artificial Sequence
  Cyclic GFR-binding peptide
DLSPISILYIIGKTPKI

SEQ ID NO: 4706 - protein, 17 aa, Artificial Sequence
  Cyclic GFR-binding peptide
RLNAISILYFDAANNVV

SEQ ID NO: 4707 - protein, 19 aa, Artificial Sequence
  Cyclic GFR-binding peptide
  MOD_RES (5)..(6): Xaa is C or S
SAAPXXVPQALEPISILYL

SEQ ID NO: 4708 - protein, 18 aa, Artificial Sequence
  Cyclic GFR-binding peptide
  MOD_RES (4)..(5): Xaa is C or S
PASXXVPARLNAISILYF

SEQ ID NO: 4709 - protein, 27 aa, Artificial Sequence
  Cyclic GFR-binding peptide
  MOD_RES (6)..(7): Xaa is C or S
ASASPXXVSQDLSPISILYIIGKTPKI

SEQ ID NO: 4710 - protein, 18 aa, Artificial Sequence
  Cyclic GFR-binding peptide
TELSPISMLYIDENEKVV

SEQ ID NO: 4711 - protein, 17 aa, Artificial Sequence
  Cyclic GFR-binding peptide
KLEPISVLYLDSSNNVI

SEQ ID NO: 4712 - protein, 27 aa, Artificial Sequence
  Cyclic GFR-binding peptide
  MOD_RES (7)..(7): Xaa is C or S
HVTKPTXAPTKLSPISVLYIDDSSNVI

SEQ ID NO: 4713 - protein, 19 aa, Artificial Sequence
  Cyclic GFR-binding peptide
PTELEPISMLYLDENEKVV

SEQ ID NO: 4714 - protein, 15 aa, Artificial Sequence
  Cyclic GFR-binding peptide
SPISILYIDKGVVTY

SEQ ID NO: 4715 - protein, 18 aa, Artificial Sequence
  Cyclic GFR-binding peptide
  MOD_RES (4)..(5): Xaa is C or S
PKAXXVPTELNAISMLYF

SEQ ID NO: 4716 - protein, 13 aa, Artificial Sequence
  Cyclic GFR-binding peptide
VPTKLEPISVLYL

SEQ ID NO: 4717 - protein, 18 aa, Artificial Sequence
  Cyclic GFR-binding peptide
TELSPISMLYKDEYDKVV

SEQ ID NO: 4718 - protein, 27 aa, Artificial Sequence
  Cyclic GFR-binding peptide
  MOD_RES (6)..(7): Xaa is C or S
KIPKAXXVPTELEPISMLYLDENEKVV

SEQ ID NO: 4719 - protein, 15 aa, Artificial Sequence
  Cyclic GFR-binding peptide
SPISILYKDAANNVV

SEQ ID NO: 4720 - protein, 16 aa, Artificial Sequence
  Cyclic GFR-binding peptide
LEPISVLYLDSSNNVI

SEQ ID NO: 4721 - protein, 13 aa, Artificial Sequence
  Cyclic GFR-binding peptide
VPARLSPISILYK

SEQ ID NO: 4722 - protein, 19 aa, Artificial Sequence
  Cyclic GFR-binding peptide
PTKLNAISILYFDKGVVTY

SEQ ID NO: 4723 - protein, 16 aa, Artificial Sequence
  Cyclic GFR-binding peptide
  MOD_RES (2)..(3): Xaa is C or S
PXXAPTKLEPISVLYL

SEQ ID NO: 4724 - protein, 17 aa, Artificial Sequence
  Cyclic GFR-binding peptide
  MOD_RES (3)..(4): Xaa is C or S
KAXXVPTELSPISMLYI

SEQ ID NO: 4725 - protein, 15 aa, Artificial Sequence
  Cyclic GFR-binding peptide
SPISVLYIDSSNNVI

SEQ ID NO: 4726 - protein, 15 aa, Artificial Sequence
  Cyclic GFR-binding peptide
  MOD_RES (1)..(2): Xaa is C or S
XXVPTKLEPISVLYL

SEQ ID NO: 4727 - protein, 19 aa, Artificial Sequence
  Cyclic GFR-binding peptide
PTELSPISMLYIDEYDKVV

SEQ ID NO: 4728 - protein, 17 aa, Artificial Sequence
  Cyclic GFR-binding peptide
  MOD_RES (3)..(4): Xaa is C or S
APXXVPQALSPISILYK

SEQ ID NO: 4729 - protein, 27 aa, Artificial Sequence
  Cyclic GFR-binding peptide
  MOD_RES (6)..(7): Xaa is C or S
SIPKAXXVPTELSPISMLYKDEYDKVV

SEQ ID NO: 4730 - protein, 27 aa, Artificial Sequence
  Cyclic GFR-binding peptide
  MOD_RES (6)..(7): Xaa is C or S
AAPASXXVPARLEPISILYLDAANNVV

SEQ ID NO: 4731 - protein, 17 aa, Artificial Sequence
  Cyclic GFR-binding peptide
  MOD_RES (3)..(4): Xaa is C or S
APXXVPQALSPISILYI

SEQ ID NO: 4732 - protein, 27 aa, Artificial Sequence
  Cyclic GFR-binding peptide
  MOD_RES (6)..(7): Xaa is C or S
AVPKAXXAPTKLNAISVLYFDSSNNVI

SEQ ID NO: 4733 - protein, 18 aa, Artificial Sequence
  Cyclic GFR-binding peptide
  MOD_RES (4)..(5): Xaa is C or S
GKAXXVPTKLNAISVLYF

SEQ ID NO: 4734 - protein, 15 aa, Artificial Sequence
  Cyclic GFR-binding peptide
  MOD_RES (1)..(2): Xaa is C or S
XXVPARLNAISILYF

SEQ ID NO: 4735 - protein, 17 aa, Artificial Sequence
  Cyclic GFR-binding peptide
DLNAISILYFVGRTPKV

SEQ ID NO: 4736 - protein, 17 aa, Artificial Sequence
  Cyclic GFR-binding peptide
  MOD_RES (3)..(4): Xaa is C or S
KAXXVPTELNAISMLYF

SEQ ID NO: 4737 - protein, 19 aa, Artificial Sequence
  Cyclic GFR-binding peptide
SQDLSPISILYIIGKTPKI

SEQ ID NO: 4738 - protein, 17 aa, Artificial Sequence
  Cyclic GFR-binding peptide
  MOD_RES (3)..(4): Xaa is C or S
APXXVPQALNAISILYF

SEQ ID NO: 4739 - protein, 17 aa, Artificial Sequence
  Cyclic GFR-binding peptide
QLSPISVLYKDDSSNVI

SEQ ID NO: 4740 - protein, 19 aa, Artificial Sequence
  Cyclic GFR-binding peptide
PARLEPISILYLDAANNVV

SEQ ID NO: 4741 - protein, 18 aa, Artificial Sequence
  Cyclic GFR-binding peptide
  MOD_RES (4)..(5): Xaa is C or S
GKAXXVPTKLSPISVLYI

SEQ ID NO: 4742 - protein, 19 aa, Artificial Sequence
  Cyclic GFR-binding peptide
PQALEPISILYLVGRKPKV

SEQ ID NO: 4743 - protein, 18 aa, Artificial Sequence
  Cyclic GFR-binding peptide
TKLSPISVLYIDDMGVPT

SEQ ID NO: 4744 - protein, 19 aa, Artificial Sequence
  Cyclic GFR-binding peptide
  MOD_RES (5)..(6): Xaa is C or S
SASPXXVPQDLEPISILYL

SEQ ID NO: 4745 - protein, 17 aa, Artificial Sequence
  Cyclic GFR-binding peptide
KLSPISVLYKDDSSNVI

SEQ ID NO: 4746 - protein, 20 aa, Artificial Sequence
  Cyclic GFR-binding peptide
  MOD_RES (6)..(7): Xaa is C or S
KVGKAXXVPTKLEPISVLYL

SEQ ID NO: 4747 - protein, 17 aa, Artificial Sequence
  Cyclic GFR-binding peptide
  MOD_RES (3)..(4): Xaa is C or S
KAXXVPTELSPISMLYK

SEQ ID NO: 4748 - protein, 19 aa, Artificial Sequence
  Cyclic GFR-binding peptide
PTKLNAISVLYFDSSNNVI

SEQ ID NO: 4749 - protein, 20 aa, Artificial Sequence
  Cyclic GFR-binding peptide
  MOD_RES (6)..(7): Xaa is C or S
TVPKPXXAPTQLSPISVLYI

SEQ ID NO: 4750 - protein, 17 aa, Artificial Sequence
  Cyclic GFR-binding peptide
  MOD_RES (3)..(4): Xaa is C or S
APXXVPQALEPISILYL

SEQ ID NO: 4751 - protein, 20 aa, Artificial Sequence
  Cyclic GFR-binding peptide
  MOD_RES (6)..(7): Xaa is C or S
TVPKPXXAPTQLSPISVLYK

SEQ ID NO: 4752 - protein, 18 aa, Artificial Sequence
  Cyclic GFR-binding peptide
  MOD_RES (4)..(5): Xaa is C or S
ASPXXVPQDLSPISILYI

SEQ ID NO: 4753 - protein, 18 aa, Artificial Sequence
  Cyclic GFR-binding peptide
  MOD_RES (4)..(5): Xaa is C or S
ASPXXVPQDLSPISILYK

SEQ ID NO: 4754 - protein, 16 aa, Artificial Sequence
  Cyclic GFR-binding peptide
LSPISILYIVGRTPKV

SEQ ID NO: 4755 - protein, 14 aa, Artificial Sequence
  Cyclic GFR-binding peptide
  MOD_RES (1)..(1): Xaa is C or S
XVPTKLSPISVLYI

SEQ ID NO: 4756 - protein, 17 aa, Artificial Sequence
  Cyclic GFR-binding peptide
  MOD_RES (3)..(4): Xaa is C or S
KAXXAPTKLNAISVLYF

SEQ ID NO: 4757 - protein, 17 aa, Artificial Sequence
  Cyclic GFR-binding peptide
  MOD_RES (3)..(4): Xaa is C or S
SPXXVPQDLSPISILYK

SEQ ID NO: 4758 - protein, 17 aa, Artificial Sequence
  Cyclic GFR-binding peptide
  MOD_RES (3)..(4): Xaa is C or S
SPXXVPQDLSPISILYI

SEQ ID NO: 4759 - protein, 16 aa, Artificial Sequence
  Cyclic GFR-binding peptide
  MOD_RES (2)..(3): Xaa is C or S
PXXVPQALSPISILYI

SEQ ID NO: 4760 - protein, 20 aa, Artificial Sequence
  Cyclic GFR-binding peptide
  MOD_RES (6)..(7): Xaa is C or S
AVPKAXXAPTKLSPISVLYK

SEQ ID NO: 4761 - protein, 27 aa, Artificial Sequence
  Cyclic GFR-binding peptide
  MOD_RES (7)..(7): Xaa is C or S
HVTKPTXAPTKLEPISVLYLDDSSNVI

SEQ ID NO: 4762 - protein, 20 aa, Artificial Sequence
  Cyclic GFR-binding peptide
  MOD_RES (6)..(7): Xaa is C or S
AVPKAXXAPTKLSPISVLYI

SEQ ID NO: 4763 - protein, 16 aa, Artificial Sequence
  Cyclic GFR-binding peptide
  MOD_RES (2)..(3): Xaa is C or S
PXXVPQALSPISILYK

SEQ ID NO: 4764 - protein, 27 aa, Artificial Sequence
  Cyclic GFR-binding peptide
  MOD_RES (6)..(7): Xaa is C or S
SIPKAXXVPTELNAISMLYFDEYDKVV

SEQ ID NO: 4765 - protein, 16 aa, Artificial Sequence
  Cyclic GFR-binding peptide
  MOD_RES (2)..(3): Xaa is C or S
PXXAPTQLEPISVLYL

SEQ ID NO: 4766 - protein, 17 aa, Artificial Sequence
  Cyclic GFR-binding peptide
KLEPISVLYLDDSSNVI

SEQ ID NO: 4767 - protein, 17 aa, Artificial Sequence
  Cyclic GFR-binding peptide
QLEPISVLYLDDSSNVI

SEQ ID NO: 4768 - protein, 19 aa, Artificial Sequence
  Cyclic GFR-binding peptide
PQDLSPISILYKVGRTPKV

SEQ ID NO: 4769 - protein, 20 aa, Artificial Sequence
  Cyclic GFR-binding peptide
  MOD_RES (6)..(7): Xaa is C or S
TVPKPXXAPTQLEPISVLYL

SEQ ID NO: 4770 - protein, 17 aa, Artificial Sequence
  Cyclic GFR-binding peptide
KLEPISVLYLDDMGVPT

SEQ ID NO: 4771 - protein, 18 aa, Artificial Sequence
  Cyclic GFR-binding peptide
TELEPISMLYLDEYDKVV

SEQ ID NO: 4772 - protein, 18 aa, Artificial Sequence
  Cyclic GFR-binding peptide
TKLEPISVLYLDSSNNVI

SEQ ID NO: 4773 - protein, 19 aa, Artificial Sequence
  Cyclic GFR-binding peptide
  MOD_RES (5)..(6): Xaa is C or S
VPKPXXAPTQLEPISVLYL

SEQ ID NO: 4774 - protein, 17 aa, Artificial Sequence
  Cyclic GFR-binding peptide
  MOD_RES (3)..(4): Xaa is C or S
KAXXVPTKLNAISVLYF

SEQ ID NO: 4775 - protein, 27 aa, Artificial Sequence
  Cyclic GFR-binding peptide
  MOD_RES (6)..(7): Xaa is C or S
YVPKPXXAPTKLEPISVLYLDDSSNVI

SEQ ID NO: 4776 - protein, 19 aa, Artificial Sequence
  Cyclic GFR-binding peptide
  MOD_RES (5)..(6): Xaa is C or S
SASPXXVSQDLSPISILYI

SEQ ID NO: 4777 - protein, 19 aa, Artificial Sequence
  Cyclic GFR-binding peptide
  MOD_RES (5)..(6): Xaa is C or S
SASPXXVSQDLSPISILYK

SEQ ID NO: 4778 - protein, 27 aa, Artificial Sequence
  Cyclic GFR-binding peptide
  MOD_RES (6)..(7): Xaa is C or S
ASASPXXVSQDLSPISILYKIGKTPKI

SEQ ID NO: 4779 - protein, 17 aa, Artificial Sequence
  Cyclic GFR-binding peptide
  MOD_RES (3)..(4): Xaa is C or S
KPXXAPTKLEPISVLYL

SEQ ID NO: 4780 - protein, 16 aa, Artificial Sequence
  Cyclic GFR-binding peptide
LSPISVLYIDSSNNVI

SEQ ID NO: 4781 - protein, 15 aa, Artificial Sequence
  Cyclic GFR-binding peptide
  MOD_RES (1)..(2): Xaa is C or S
XXVPQDLNAISILYF

SEQ ID NO: 4782 - protein, 27 aa, Artificial Sequence
  Cyclic GFR-binding peptide
  MOD_RES (6)..(7): Xaa is C or S
KIPKAXXVPTELSPISMLYKDENEKVV

SEQ ID NO: 4783 - protein, 19 aa, Artificial Sequence
  Cyclic GFR-binding peptide
PTKLSPISVLYKDDSSNVI

SEQ ID NO: 4784 - protein, 15 aa, Artificial Sequence
  Cyclic GFR-binding peptide
SPISILYIIGKTPKI

SEQ ID NO: 4785 - protein, 14 aa, Artificial Sequence
  Cyclic GFR-binding peptide
  MOD_RES (1)..(1): Xaa is C or S
XVPTELSPISMLYK

SEQ ID NO: 4786 - protein, 17 aa, Artificial Sequence
  Cyclic GFR-binding peptide
ALSPISILYKVGRKPKV

SEQ ID NO: 4787 - protein, 15 aa, Artificial Sequence
  Cyclic GFR-binding peptide
EPISVLYLDSSNNVI

SEQ ID NO: 4788 - protein, 17 aa, Artificial Sequence
  Cyclic GFR-binding peptide
KLSPISILYIDKGVVTY

SEQ ID NO: 4789 - protein, 20 aa, Artificial Sequence
  Cyclic GFR-binding peptide
  MOD_RES (6)..(7): Xaa is C or S
KIPKAXXVPTELNAISMLYF

SEQ ID NO: 4790 - protein, 17 aa, Artificial Sequence
  Cyclic GFR-binding peptide
ELNAISMLYFDENEKVV

SEQ ID NO: 4791 - protein, 16 aa, Artificial Sequence
  Cyclic GFR-binding peptide
LEPISMLYLDENEKVV

SEQ ID NO: 4792 - protein, 18 aa, Artificial Sequence
  Cyclic GFR-binding peptide
  MOD_RES (4)..(5): Xaa is C or S
ASPXXVPQDLEPISILYL

SEQ ID NO: 4793 - protein, 16 aa, Artificial Sequence
  Cyclic GFR-binding peptide
LSPISVLYIDDSSNVI

SEQ ID NO: 4794 - protein, 20 aa, Artificial Sequence
  Cyclic GFR-binding peptide
  MOD_RES (6)..(7): Xaa is C or S
ASAAPXXVPQALEPISILYL

SEQ ID NO: 4795 - protein, 19 aa, Artificial Sequence
  Cyclic GFR-binding peptide
PTQLSPISVLYKDDSSNVI

SEQ ID NO: 4796 - protein, 17 aa, Artificial Sequence
  Cyclic GFR-binding peptide
ELEPISMLYLDENEKVV

SEQ ID NO: 4797 - protein, 16 aa, Artificial Sequence
  Cyclic GFR-binding peptide
LSPISILYIDKGVVTY

SEQ ID NO: 4798 - protein, 17 aa, Artificial Sequence
  Cyclic GFR-binding peptide
KLSPISVLYIDSSNNVI

SEQ ID NO: 4799 - protein, 13 aa, Artificial Sequence
  Cyclic GFR-binding peptide
VPTKLNAISILYF

SEQ ID NO: 4800 - protein, 17 aa, Artificial Sequence
  Cyclic GFR-binding peptide
KLSPISVLYIDDSSNVI

SEQ ID NO: 4801 - protein, 17 aa, Artificial Sequence
  Cyclic GFR-binding peptide
QLSPISVLYIDDSSNVI

SEQ ID NO: 4802 - protein, 27 aa, Artificial Sequence
  Cyclic GFR-binding peptide
  MOD_RES (6)..(7): Xaa is C or S
ASAAPXXVPQALSPISILYKVGRKPKV

SEQ ID NO: 4803 - protein, 27 aa, Artificial Sequence
  Cyclic GFR-binding peptide
  MOD_RES (6)..(7): Xaa is C or S
ASASPXXVPQDLEPISILYLVGRTPKV

SEQ ID NO: 4804 - protein, 20 aa, Artificial Sequence
  Cyclic GFR-binding peptide
  MOD_RES (6)..(7): Xaa is C or S
KVGKAXXVPTKLSPISVLYI

SEQ ID NO: 4805 - protein, 15 aa, Artificial Sequence
  Cyclic GFR-binding peptide
  MOD_RES (1)..(2): Xaa is C or S
XXVPTKLNAISILYF

SEQ ID NO: 4806 - protein, 15 aa, Artificial Sequence
  Cyclic GFR-binding peptide
  MOD_RES (1)..(2): Xaa is C or S
XXVPQALNAISILYF

SEQ ID NO: 4807 - protein, 13 aa, Artificial Sequence
  Cyclic GFR-binding peptide
VPQALNAISILYF

SEQ ID NO: 4808 - protein, 17 aa, Artificial Sequence
  Cyclic GFR-binding peptide
  MOD_RES (3)..(4): Xaa is C or S
KAXXVPTELEPISMLYL

SEQ ID NO: 4809 - protein, 15 aa, Artificial Sequence
  Cyclic GFR-binding peptide
  MOD_RES (2)..(2): Xaa is C or S
TXAPTKLSPISVLYI

SEQ ID NO: 4810 - protein, 16 aa, Artificial Sequence
  Cyclic GFR-binding peptide
LEPISILYLDAANNVV

SEQ ID NO: 4811 - protein, 19 aa, Artificial Sequence
  Cyclic GFR-binding peptide
PQALSPISILYKVGRKPKV

SEQ ID NO: 4812 - protein, 15 aa, Artificial Sequence
  Cyclic GFR-binding peptide
EPISILYLVGRTPKV

SEQ ID NO: 4813 - protein, 18 aa, Artificial Sequence
  Cyclic GFR-binding peptide
TKLSPISILYKDKGVVTY

SEQ ID NO: 4814 - protein, 27 aa, Artificial Sequence
  Cyclic GFR-binding peptide
  MOD_RES (6)..(7): Xaa is C or S
ASAAPXXVPQALEPISILYLVGRKPKV

SEQ ID NO: 4815 - protein, 15 aa, Artificial Sequence
  Cyclic GFR-binding peptide
  MOD_RES (2)..(2): Xaa is C or S
TXAPTKLSPISVLYK

SEQ ID NO: 4816 - protein, 15 aa, Artificial Sequence
  Cyclic GFR-binding peptide
NAISILYFDKGVVTY

SEQ ID NO: 4817 - protein, 18 aa, Artificial Sequence
  Cyclic GFR-binding peptide
TELNAISMLYFDEYDKVV

SEQ ID NO: 4818 - protein, 17 aa, Artificial Sequence
  Cyclic GFR-binding peptide
ALNAISILYFVGRKPKV

SEQ ID NO: 4819 - protein, 14 aa, Artificial Sequence
  Cyclic GFR-binding peptide
  MOD_RES (1)..(1): Xaa is C or S
XVSQDLNAISILYF

SEQ ID NO: 4820 - protein, 13 aa, Artificial Sequence
  Cyclic GFR-binding peptide
APTKLEPISVLYL

SEQ ID NO: 4821 - protein, 27 aa, Artificial Sequence
  Cyclic GFR-binding peptide
  MOD_RES (6)..(7): Xaa is C or S
AVPKAXXAPTKLSPISVLYKDSSNNVI

SEQ ID NO: 4822 - protein, 15 aa, Artificial Sequence
  Cyclic GFR-binding peptide
  MOD_RES (1)..(2): Xaa is C or S
XXVPTELSPISMLYK

SEQ ID NO: 4823 - protein, 16 aa, Artificial Sequence
  Cyclic GFR-binding peptide
LEPISVLYLDDMGVPT

SEQ ID NO: 4824 - protein, 14 aa, Artificial Sequence
  Cyclic GFR-binding peptide
  MOD_RES (1)..(1): Xaa is C or S
XVPQDLNAISILYF

SEQ ID NO: 4825 - protein, 15 aa, Artificial Sequence
  Cyclic GFR-binding peptide
  MOD_RES (1)..(2): Xaa is C or S
XXVPTELSPISMLYI

SEQ ID NO: 4826 - protein, 13 aa, Artificial Sequence
  Cyclic GFR-binding peptide
VPQDLNAISILYF

SEQ ID NO: 4827 - protein, 20 aa, Artificial Sequence
  Cyclic GFR-binding peptide
  MOD_RES (6)..(7): Xaa is C or S
ASASPXXVPQDLSPISILYI

SEQ ID NO: 4828 - protein, 20 aa, Artificial Sequence
  Cyclic GFR-binding peptide
  MOD_RES (6)..(7): Xaa is C or S
ASASPXXVPQDLSPISILYK

SEQ ID NO: 4829 - protein, 19 aa, Artificial Sequence
  Cyclic GFR-binding peptide
PTKLSPISILYIDKGVVTY

SEQ ID NO: 4830 - protein, 15 aa, Artificial Sequence
  Cyclic GFR-binding peptide
NAISVLYFDSSNNVI

SEQ ID NO: 4831 - protein, 17 aa, Artificial Sequence
  Cyclic GFR-binding peptide
  MOD_RES (3)..(4): Xaa is C or S
KAXXVPTKLEPISVLYL

SEQ ID NO: 4832 - protein, 16 aa, Artificial Sequence
  Cyclic GFR-binding peptide
LSPISMLYKDENEKVV

SEQ ID NO: 4833 - protein, 19 aa, Artificial Sequence
  Cyclic GFR-binding peptide
  MOD_RES (5)..(6): Xaa is C or S
VGKAXXVPTKLNAISVLYF

SEQ ID NO: 4834 - protein, 14 aa, Artificial Sequence
  Cyclic GFR-binding peptide
  MOD_RES (1)..(1): Xaa is C or S
XVPQALEPISILYL

SEQ ID NO: 4835 - protein, 14 aa, Artificial Sequence
  Cyclic GFR-binding peptide
  MOD_RES (1)..(1): Xaa is C or S
XVPTELSPISMLYI

SEQ ID NO: 4836 - protein, 16 aa, Artificial Sequence
  Cyclic GFR-binding peptide
  MOD_RES (2)..(3): Xaa is C or S
AXXVPTKLNAISVLYF

SEQ ID NO: 4837 - protein, 16 aa, Artificial Sequence
  Cyclic GFR-binding peptide
  MOD_RES (2)..(3): Xaa is C or S
PXXVSQDLSPISILYI

SEQ ID NO: 4838 - protein, 16 aa, Artificial Sequence
  Cyclic GFR-binding peptide
  MOD_RES (2)..(3): Xaa is C or S
PXXVSQDLSPISILYK

SEQ ID NO: 4839 - protein, 14 aa, Artificial Sequence
  Cyclic GFR-binding peptide
  MOD_RES (1)..(1): Xaa is C or S
XAPTKLEPISVLYL

SEQ ID NO: 4840 - protein, 27 aa, Artificial Sequence
  Cyclic GFR-binding peptide
  MOD_RES (6)..(7): Xaa is C or S
AAPASXXVPARLSPISILYKDAANNVV

SEQ ID NO: 4841 - protein, 18 aa, Artificial Sequence
  Cyclic GFR-binding peptide
  MOD_RES (5)..(5): Xaa is C or S
TKPTXAPTKLEPISVLYL

SEQ ID NO: 4842 - protein, 17 aa, Artificial Sequence
  Cyclic GFR-binding peptide
DLEPISILYLIGKTPKI

SEQ ID NO: 4843 - protein, 20 aa, Artificial Sequence
  Cyclic GFR-binding peptide
  MOD_RES (6)..(7): Xaa is C or S
ASAAPXXVPQALNAISILYF

SEQ ID NO: 4844 - protein, 18 aa, Artificial Sequence
  Cyclic GFR-binding peptide
  MOD_RES (4)..(5): Xaa is C or S
SKAXXVPTKLSPISILYK

SEQ ID NO: 4845 - protein, 18 aa, Artificial Sequence
  Cyclic GFR-binding peptide
  MOD_RES (4)..(5): Xaa is C or S
SKAXXVPTKLSPISILYI

SEQ ID NO: 4846 - protein, 15 aa, Artificial Sequence
  Cyclic GFR-binding peptide
SPISILYIVGRKPKV

SEQ ID NO: 4847 - protein, 19 aa, Artificial Sequence
  Cyclic GFR-binding peptide
PTQLEPISVLYLDDSSNVI

SEQ ID NO: 4848 - protein, 17 aa, Artificial Sequence
  Cyclic GFR-binding peptide
  MOD_RES (3)..(4): Xaa is C or S
KPXXAPTQLEPISVLYL

SEQ ID NO: 4849 - protein, 18 aa, Artificial Sequence
  Cyclic GFR-binding peptide
  MOD_RES (4)..(5): Xaa is C or S
ASPXXVSQDLNAISILYF

SEQ ID NO: 4850 - protein, 27 aa, Artificial Sequence
  Cyclic GFR-binding peptide
  MOD_RES (6)..(7): Xaa is C or S
ASASPXXVPQDLSPISILYIVGRTPKV

SEQ ID NO: 4851 - protein, 14 aa, Artificial Sequence
  Cyclic GFR-binding peptide
  MOD_RES (1)..(1): Xaa is C or S
XVPARLSPISILYK

SEQ ID NO: 4852 - protein, 16 aa, Artificial Sequence
  Cyclic GFR-binding peptide
LEPISVLYLDDSSNVI

SEQ ID NO: 4853 - protein, 20 aa, Artificial Sequence
  Cyclic GFR-binding peptide
  MOD_RES (6)..(7): Xaa is C or S
KIPKAXXVPTELEPISMLYL

SEQ ID NO: 4854 - protein, 16 aa, Artificial Sequence
  Cyclic GFR-binding peptide
  MOD_RES (2)..(3): Xaa is C or S
AXXVPTKLEPISVLYL

SEQ ID NO: 4855 - protein, 19 aa, Artificial Sequence
  Cyclic GFR-binding peptide
PTELSPISMLYKDENEKVV

SEQ ID NO: 4856 - protein, 15 aa, Artificial Sequence
  Cyclic GFR-binding peptide
NAISILYFVGRTPKV

SEQ ID NO: 4857 - protein, 27 aa, Artificial Sequence
  Cyclic GFR-binding peptide
  MOD_RES (6)..(7): Xaa is C or S
SIPKAXXVPTELEPISMLYLDEYDKVV

SEQ ID NO: 4858 - protein, 18 aa, Artificial Sequence
  Cyclic GFR-binding peptide
QDLSPISILYIVGRTPKV

SEQ ID NO: 4859 - protein, 19 aa, Artificial Sequence
  Cyclic GFR-binding peptide
PTKLSPISVLYIDSSNNVI

SEQ ID NO: 4860 - protein, 17 aa, Artificial Sequence
  Cyclic GFR-binding peptide
KLNAISVLYFDDMGVPT

SEQ ID NO: 4861 - protein, 27 aa, Artificial Sequence
  Cyclic GFR-binding peptide
  MOD_RES (6)..(7): Xaa is C or S
ASAAPXXVPQALNAISILYFVGRKPKV

SEQ ID NO: 4862 - protein, 16 aa, Artificial Sequence
  Cyclic GFR-binding peptide
  MOD_RES (2)..(3): Xaa is C or S
AXXVPTELEPISMLYL

SEQ ID NO: 4863 - protein, 18 aa, Artificial Sequence
  Cyclic GFR-binding peptide
  MOD_RES (4)..(5): Xaa is C or S
PKPXXAPTQLEPISVLYL

SEQ ID NO: 4864 - protein, 17 aa, Artificial Sequence
  Cyclic GFR-binding peptide
  MOD_RES (3)..(4): Xaa is C or S
KAXXVPTKLNAISILYF

SEQ ID NO: 4865 - protein, 15 aa, Artificial Sequence
  Cyclic GFR-binding peptide
SPISMLYIDEYDKVV

SEQ ID NO: 4866 - protein, 27 aa, Artificial Sequence
  Cyclic GFR-binding peptide
  MOD_RES (6)..(7): Xaa is C or S
YVPKPXXAPTKLSPISVLYKDDSSNVI

SEQ ID NO: 4867 - protein, 20 aa, Artificial Sequence
  Cyclic GFR-binding peptide
  MOD_RES (6)..(7): Xaa is C or S
AAPASXXVPARLSPISILYK

SEQ ID NO: 4868 - protein, 18 aa, Artificial Sequence
  Cyclic GFR-binding peptide
TKLSPISVLYKDSSNNVI

SEQ ID NO: 4869 - protein, 13 aa, Artificial Sequence
  Cyclic GFR-binding peptide
APTQLEPISVLYL

SEQ ID NO: 4870 - protein, 14 aa, Artificial Sequence
  Cyclic GFR-binding peptide
  MOD_RES (1)..(1): Xaa is C or S
XVPQDLEPISILYL

SEQ ID NO: 4871 - protein, 16 aa, Artificial Sequence
  Cyclic GFR-binding peptide
LNAISILYFDAANNVV

SEQ ID NO: 4872 - protein, 16 aa, Artificial Sequence
  Cyclic GFR-binding peptide
  MOD_RES (2)..(3): Xaa is C or S
SXXVPARLEPISILYL

SEQ ID NO: 4873 - protein, 19 aa, Artificial Sequence
  Cyclic GFR-binding peptide
  MOD_RES (5)..(6): Xaa is C or S
VPKAXXAPTKLEPISVLYL

SEQ ID NO: 4874 - protein, 15 aa, Artificial Sequence
  Cyclic GFR-binding peptide
  MOD_RES (1)..(2): Xaa is C or S
XXAPTQLEPISVLYL

SEQ ID NO: 4875 - protein, 19 aa, Artificial Sequence
  Cyclic GFR-binding peptide
  MOD_RES (6)..(6): Xaa is C or S
VTKPTXAPTKLEPISVLYL

SEQ ID NO: 4876 - protein, 27 aa, Artificial Sequence
  Cyclic GFR-binding peptide
  MOD_RES (6)..(7): Xaa is C or S
ASASPXXVSQDLNAISILYFIGKTPKI

SEQ ID NO: 4877 - protein, 17 aa, Artificial Sequence
  Cyclic GFR-binding peptide
  MOD_RES (3)..(4): Xaa is C or S
SPXXVSQDLSPISILYK

SEQ ID NO: 4878 - protein, 19 aa, Artificial Sequence
  Cyclic GFR-binding peptide
PTELNAISMLYFDENEKVV

SEQ ID NO: 4879 - protein, 17 aa, Artificial Sequence
  Cyclic GFR-binding peptide
KLNAISVLYFDSSNNVI

SEQ ID NO: 4880 - protein, 27 aa, Artificial Sequence
  Cyclic GFR-binding peptide
  MOD_RES (6)..(7): Xaa is C or S
KIPKAXXVPTELNAISMLYFDENEKVV

SEQ ID NO: 4881 - protein, 14 aa, Artificial Sequence
  Cyclic GFR-binding peptide
  MOD_RES (1)..(1): Xaa is C or S
XVPQALNAISILYF

SEQ ID NO: 4882 - protein, 15 aa, Artificial Sequence
  Cyclic GFR-binding peptide
SPISVLYIDDSSNVI

SEQ ID NO: 4883 - protein, 27 aa, Artificial Sequence
  Cyclic GFR-binding peptide
  MOD_RES (6)..(7): Xaa is C or S
ASASPXXVPQDLNAISILYFVGRTPKV

SEQ ID NO: 4884 - protein, 17 aa, Artificial Sequence
  Cyclic GFR-binding peptide
  MOD_RES (3)..(4): Xaa is C or S
SPXXVSQDLSPISILYI

SEQ ID NO: 4885 - protein, 20 aa, Artificial Sequence
  Cyclic GFR-binding peptide
  MOD_RES (6)..(7): Xaa is C or S
KASKAXXVPTKLSPISILYK

SEQ ID NO: 4886 - protein, 20 aa, Artificial Sequence
  Cyclic GFR-binding peptide
  MOD_RES (6)..(7): Xaa is C or S
KASKAXXVPTKLSPISILYI

SEQ ID NO: 4887 - protein, 15 aa, Artificial Sequence
  Cyclic GFR-binding peptide
  MOD_RES (1)..(2): Xaa is C or S
XXAPTKLSPISVLYK

SEQ ID NO: 4888 - protein, 16 aa, Artificial Sequence
  Cyclic GFR-binding peptide
LSPISILYKDAANNVV

SEQ ID NO: 4889 - protein, 13 aa, Artificial Sequence
  Cyclic GFR-binding peptide
VPARLEPISILYL

SEQ ID NO: 4890 - protein, 15 aa, Artificial Sequence
  Cyclic GFR-binding peptide
  MOD_RES (1)..(2): Xaa is C or S
XXAPTKLSPISVLYI

SEQ ID NO: 4891 - protein, 17 aa, Artificial Sequence
  Cyclic GFR-binding peptide
DLNAISILYFIGKTPKI

SEQ ID NO: 4892 - protein, 20 aa, Artificial Sequence
  Cyclic GFR-binding peptide
  MOD_RES (6)..(7): Xaa is C or S
AAPASXXVPARLNAISILYF

SEQ ID NO: 4893 - protein, 19 aa, Artificial Sequence
  Cyclic GFR-binding peptide
  MOD_RES (5)..(6): Xaa is C or S
APASXXVPARLEPISILYL

SEQ ID NO: 4894 - protein, 16 aa, Artificial Sequence
  Cyclic GFR-binding peptide
  MOD_RES (2)..(3): Xaa is C or S
PXXAPTKLSPISVLYK

SEQ ID NO: 4895 - protein, 16 aa, Artificial Sequence
  Cyclic GFR-binding peptide
  MOD_RES (2)..(3): Xaa is C or S
PXXAPTKLSPISVLYI

SEQ ID NO: 4896 - protein, 19 aa, Artificial Sequence
  Cyclic GFR-binding peptide
  MOD_RES (5)..(6): Xaa is C or S
SAAPXXVPQALSPISILYI

SEQ ID NO: 4897 - protein, 19 aa, Artificial Sequence
  Cyclic GFR-binding peptide
  MOD_RES (5)..(6): Xaa is C or S
SAAPXXVPQALSPISILYK

SEQ ID NO: 4898 - protein, 18 aa, Artificial Sequence
  Cyclic GFR-binding peptide
  MOD_RES (4)..(5): Xaa is C or S
PKAXXVPTELEPISMLYL

SEQ ID NO: 4899 - protein, 17 aa, Artificial Sequence
  Cyclic GFR-binding peptide
DLSPISILYIVGRTPKV

SEQ ID NO: 4900 - protein, 18 aa, Artificial Sequence
  Cyclic GFR-binding peptide
  MOD_RES (4)..(5): Xaa is C or S
ASPXXVSQDLEPISILYL

SEQ ID NO: 4901 - protein, 13 aa, Artificial Sequence
  Cyclic GFR-binding peptide
VPQDLSPISILYI

SEQ ID NO: 4902 - protein, 19 aa, Artificial Sequence
  Cyclic GFR-binding peptide
  MOD_RES (5)..(6): Xaa is C or S
IPKAXXVPTELSPISMLYI

SEQ ID NO: 4903 - protein, 19 aa, Artificial Sequence
  Cyclic GFR-binding peptide
PTKLEPISVLYLDSSNNVI

SEQ ID NO: 4904 - protein, 19 aa, Artificial Sequence
  Cyclic GFR-binding peptide
  MOD_RES (5)..(6): Xaa is C or S
SAAPXXVPQALNAISILYF

SEQ ID NO: 4905 - protein, 13 aa, Artificial Sequence
  Cyclic GFR-binding peptide
VPQDLSPISILYK

SEQ ID NO: 4906 - protein, 19 aa, Artificial Sequence
  Cyclic GFR-binding peptide
  MOD_RES (5)..(6): Xaa is C or S
IPKAXXVPTELSPISMLYK

SEQ ID NO: 4907 - protein, 16 aa, Artificial Sequence
  Cyclic GFR-binding peptide
LSPISILYKIGKTPKI

SEQ ID NO: 4908 - protein, 27 aa, Artificial Sequence
  Cyclic GFR-binding peptide
  MOD_RES (6)..(7): Xaa is C or S
ASASPXXVSQDLEPISILYLIGKTPKI

SEQ ID NO: 4909 - protein, 17 aa, Artificial Sequence
  Cyclic GFR-binding peptide
  MOD_RES (3)..(4): Xaa is C or S
ASXXVPARLSPISILYK

SEQ ID NO: 4910 - protein, 14 aa, Artificial Sequence
  Cyclic GFR-binding peptide
  MOD_RES (1)..(1): Xaa is C or S
XAPTQLSPISVLYI

SEQ ID NO: 4911 - protein, 14 aa, Artificial Sequence
  Cyclic GFR-binding peptide
  MOD_RES (1)..(1): Xaa is C or S
XAPTQLSPISVLYK

SEQ ID NO: 4912 - protein, 15 aa, Artificial Sequence
  Cyclic GFR-binding peptide
SPISILYKVGRTPKV

SEQ ID NO: 4913 - protein, 17 aa, Artificial Sequence
  Cyclic GFR-binding peptide
ELSPISMLYIDENEKVV

SEQ ID NO: 4914 - protein, 16 aa, Artificial Sequence
  Cyclic GFR-binding peptide
  MOD_RES (2)..(3): Xaa is C or S
AXXVPTELSPISMLYI

SEQ ID NO: 4915 - protein, 15 aa, Artificial Sequence
  Cyclic GFR-binding peptide
  MOD_RES (1)..(2): Xaa is C or S
XXVPTKLSPISVLYI

SEQ ID NO: 4916 - protein, 16 aa, Artificial Sequence
  Cyclic GFR-binding peptide
  MOD_RES (2)..(3): Xaa is C or S
AXXVPTELSPISMLYK

SEQ ID NO: 4917 - protein, 16 aa, Artificial Sequence
  Cyclic GFR-binding peptide
LNAISMLYFDEYDKVV

SEQ ID NO: 4918 - protein, 19 aa, Artificial Sequence
  Cyclic GFR-binding peptide
PTKLNAISVLYFDDMGVPT

SEQ ID NO: 4919 - protein, 18 aa, Artificial Sequence
  Cyclic GFR-binding peptide
TELSPISMLYKDENEKVV

SEQ ID NO: 4920 - protein, 15 aa, Artificial Sequence
  Cyclic GFR-binding peptide
SPISILYKDKGVVTY

SEQ ID NO: 4921 - protein, 15 aa, Artificial Sequence
  Cyclic GFR-binding peptide
SPISVLYIDDMGVPT

SEQ ID NO: 4922 - protein, 19 aa, Artificial Sequence
  Cyclic GFR-binding peptide
SQDLEPISILYLIGKTPKI

SEQ ID NO: 4923 - protein, 18 aa, Artificial Sequence
  Cyclic GFR-binding peptide
TELSPISMLYIDEYDKVV

SEQ ID NO: 4924 - protein, 15 aa, Artificial Sequence
  Cyclic GFR-binding peptide
EPISILYLVGRKPKV

SEQ ID NO: 4925 - protein, 13 aa, Artificial Sequence
  Cyclic GFR-binding peptide
VPTELSPISMLYK

SEQ ID NO: 4926 - protein, 16 aa, Artificial Sequence
  Cyclic GFR-binding peptide
LNAISILYFVGRTPKV

SEQ ID NO: 4927 - protein, 27 aa, Artificial Sequence
  Cyclic GFR-binding peptide
  MOD_RES (7)..(7): Xaa is C or S
HVTKPTXAPTKLSPISVLYKDDSSNVI

SEQ ID NO: 4928 - protein, 13 aa, Artificial Sequence
  Cyclic GFR-binding peptide
VPTKLNAISVLYF

SEQ ID NO: 4929 - protein, 17 aa, Artificial Sequence
  Cyclic GFR-binding peptide
ELNAISMLYFDEYDKVV

SEQ ID NO: 4930 - protein, 14 aa, Artificial Sequence
  Cyclic GFR-binding peptide
  MOD_RES (1)..(1): Xaa is C or S
XVSQDLSPISILYK

SEQ ID NO: 4931 - protein, 19 aa, Artificial Sequence
  Cyclic GFR-binding peptide
  MOD_RES (5)..(6): Xaa is C or S
VPKAXXAPTKLNAISVLYF

SEQ ID NO: 4932 - protein, 14 aa, Artificial Sequence
  Cyclic GFR-binding peptide
  MOD_RES (1)..(1): Xaa is C or S
XVSQDLSPISILYI

SEQ ID NO: 4933 - protein, 18 aa, Artificial Sequence
  Cyclic GFR-binding peptide
QDLSPISILYKVGRTPKV

SEQ ID NO: 4934 - protein, 13 aa, Artificial Sequence
  Cyclic GFR-binding peptide
VPTELSPISMLYI

SEQ ID NO: 4935 - protein, 27 aa, Artificial Sequence
  Cyclic GFR-binding peptide
  MOD_RES (6)..(7): Xaa is C or S
SIPKAXXVPTELSPISMLYIDEYDKVV

SEQ ID NO: 4936 - protein, 15 aa, Artificial Sequence
  Cyclic GFR-binding peptide
SPISVLYKDSSNNVI

SEQ ID NO: 4937 - protein, 18 aa, Artificial Sequence
  Cyclic GFR-binding peptide
QALEPISILYLVGRKPKV

SEQ ID NO: 4938 - protein, 16 aa, Artificial Sequence
  Cyclic GFR-binding peptide
LEPISILYLIGKTPKI

SEQ ID NO: 4939 - protein, 19 aa, Artificial Sequence
  Cyclic GFR-binding peptide
  MOD_RES (5)..(6): Xaa is C or S
IPKAXXVPTELNAISMLYF

SEQ ID NO: 4940 - protein, 18 aa, Artificial Sequence
  Cyclic GFR-binding peptide
  MOD_RES (4)..(5): Xaa is C or S
PKPXXAPTKLEPISVLYL

SEQ ID NO: 4941 - protein, 20 aa, Artificial Sequence
  Cyclic GFR-binding peptide
  MOD_RES (6)..(7): Xaa is C or S
SIPKAXXVPTELSPISMLYI

SEQ ID NO: 4942 - protein, 15 aa, Artificial Sequence
  Cyclic GFR-binding peptide
SPISMLYKDEYDKVV

SEQ ID NO: 4943 - protein, 20 aa, Artificial Sequence
  Cyclic GFR-binding peptide
  MOD_RES (6)..(7): Xaa is C or S
SIPKAXXVPTELSPISMLYK

SEQ ID NO: 4944 - protein, 19 aa, Artificial Sequence
  Cyclic GFR-binding peptide
  MOD_RES (5)..(6): Xaa is C or S
SASPXXVPQDLNAISILYF

SEQ ID NO: 4945 - protein, 13 aa, Artificial Sequence
  Cyclic GFR-binding peptide
VPTKLSPISVLYI

SEQ ID NO: 4946 - protein, 18 aa, Artificial Sequence
  Cyclic GFR-binding peptide
TKLSPISVLYIDSSNNVI

SEQ ID NO: 4947 - protein, 20 aa, Artificial Sequence
  Cyclic GFR-binding peptide
  MOD_RES (6)..(7): Xaa is C or S
SIPKAXXVPTELNAISMLYF

SEQ ID NO: 4948 - protein, 17 aa, Artificial Sequence
  Cyclic GFR-binding peptide
KLNAISILYFDKGVVTY

SEQ ID NO: 4949 - protein, 19 aa, Artificial Sequence
  Cyclic GFR-binding peptide
  MOD_RES (5)..(6): Xaa is C or S
VPKAXXAPTKLSPISVLYK

SEQ ID NO: 4950 - protein, 19 aa, Artificial Sequence
  Cyclic GFR-binding peptide
  MOD_RES (5)..(6): Xaa is C or S
VPKAXXAPTKLSPISVLYI

SEQ ID NO: 4951 - protein, 18 aa, Artificial Sequence
  Cyclic GFR-binding peptide
  MOD_RES (4)..(5): Xaa is C or S
GKAXXVPTKLEPISVLYL

SEQ ID NO: 4952 - protein, 16 aa, Artificial Sequence
  Cyclic GFR-binding peptide
  MOD_RES (2)..(3): Xaa is C or S
AXXVPTELNAISMLYF

SEQ ID NO: 4953 - protein, 19 aa, Artificial Sequence
  Cyclic GFR-binding peptide
  MOD_RES (5)..(6): Xaa is C or S
SASPXXVPQDLSPISILYI

SEQ ID NO: 4954 - protein, 16 aa, Artificial Sequence
  Cyclic GFR-binding peptide
  MOD_RES (2)..(3): Xaa is C or S
AXXVPTKLSPISILYI

SEQ ID NO: 4955 - protein, 19 aa, Artificial Sequence
  Cyclic GFR-binding peptide
  MOD_RES (5)..(6): Xaa is C or S
SASPXXVPQDLSPISILYK

SEQ ID NO: 4956 - protein, 18 aa, Artificial Sequence
  Cyclic GFR-binding peptide
TELEPISMLYLDENEKVV

SEQ ID NO: 4957 - protein, 20 aa, Artificial Sequence
  Cyclic GFR-binding peptide
  MOD_RES (6)..(7): Xaa is C or S
KASKAXXVPTKLNAISILYF

SEQ ID NO: 4958 - protein, 19 aa, Artificial Sequence
  Cyclic GFR-binding peptide
SQDLSPISILYKIGKTPKI

SEQ ID NO: 4959 - protein, 16 aa, Artificial Sequence
  Cyclic GFR-binding peptide
  MOD_RES (2)..(3): Xaa is C or S
AXXVPTKLSPISILYK

SEQ ID NO: 4960 - protein, 18 aa, Artificial Sequence
  Cyclic GFR-binding peptide
QDLNAISILYFVGRTPKV

SEQ ID NO: 4961 - protein, 20 aa, Artificial Sequence
  Cyclic GFR-binding peptide
  MOD_RES (6)..(7): Xaa is C or S
YVPKPXXAPTKLSPISVLYI

SEQ ID NO: 4962 - protein, 17 aa, Artificial Sequence
  Cyclic GFR-binding peptide
ELSPISMLYKDEYDKVV

SEQ ID NO: 4963 - protein, 20 aa, Artificial Sequence
  Cyclic GFR-binding peptide
  MOD_RES (6)..(7): Xaa is C or S
YVPKPXXAPTKLSPISVLYK

SEQ ID NO: 4964 - protein, 18 aa, Artificial Sequence
  Cyclic GFR-binding peptide
TKLSPISILYIDKGVVTY

SEQ ID NO: 4965 - protein, 16 aa, Artificial Sequence
  Cyclic GFR-binding peptide
LNAISVLYFDSSNNVI

SEQ ID NO: 4966 - protein, 13 aa, Artificial Sequence
  Cyclic GFR-binding peptide
VPQALEPISILYL

SEQ ID NO: 4967 - protein, 15 aa, Artificial Sequence
  Cyclic GFR-binding peptide
SPISMLYIDENEKVV

SEQ ID NO: 4968 - protein, 16 aa, Artificial Sequence
  Cyclic GFR-binding peptide
  MOD_RES (2)..(3): Xaa is C or S
AXXAPTKLNAISVLYF

SEQ ID NO: 4969 - protein, 16 aa, Artificial Sequence
  Cyclic GFR-binding peptide
  MOD_RES (2)..(3): Xaa is C or S
AXXVPTKLNAISILYF

SEQ ID NO: 4970 - protein, 16 aa, Artificial Sequence
  Cyclic GFR-binding peptide
LSPISMLYIDENEKVV

SEQ ID NO: 4971 - protein, 19 aa, Artificial Sequence
  Cyclic GFR-binding peptide
PQDLNAISILYFVGRTPKV

SEQ ID NO: 4972 - protein, 15 aa, Artificial Sequence
  Cyclic GFR-binding peptide
  MOD_RES (1)..(2): Xaa is C or S
XXVPARLEPISILYL

SEQ ID NO: 4973 - protein, 15 aa, Artificial Sequence
  Cyclic GFR-binding peptide
EPISMLYLDEYDKVV

SEQ ID NO: 4974 - protein, 15 aa, Artificial Sequence
  Cyclic GFR-binding peptide
  MOD_RES (1)..(2): Xaa is C or S
XXVPTKLNAISVLYF

SEQ ID NO: 4975 - protein, 18 aa, Artificial Sequence
  Cyclic GFR-binding peptide
  MOD_RES (4)..(5): Xaa is C or S
PKAXXAPTKLEPISVLYL

SEQ ID NO: 4976 - protein, 19 aa, Artificial Sequence
  Cyclic GFR-binding peptide
  MOD_RES (5)..(6): Xaa is C or S
ASKAXXVPTKLSPISILYK

SEQ ID NO: 4977 - protein, 19 aa, Artificial Sequence
  Cyclic GFR-binding peptide
  MOD_RES (5)..(6): Xaa is C or S
ASKAXXVPTKLSPISILYI

SEQ ID NO: 4978 - protein, 17 aa, Artificial Sequence
  Cyclic GFR-binding peptide
  MOD_RES (3)..(4): Xaa is C or S
ASXXVPARLNAISILYF

SEQ ID NO: 4979 - protein, 17 aa, Artificial Sequence
  Cyclic GFR-binding peptide
DLSPISILYKIGKTPKI

SEQ ID NO: 4980 - protein, 27 aa, Artificial Sequence
  Cyclic GFR-binding peptide
  MOD_RES (6)..(7): Xaa is C or S
KASKAXXVPTKLSPISILYIDKGVVTY

SEQ ID NO: 4981 - protein, 19 aa, Artificial Sequence
  Cyclic GFR-binding peptide
  MOD_RES (5)..(6): Xaa is C or S
VPKPXXAPTQLSPISVLYK

SEQ ID NO: 4982 - protein, 19 aa, Artificial Sequence
  Cyclic GFR-binding peptide
  MOD_RES (5)..(6): Xaa is C or S
VPKPXXAPTQLSPISVLYI

SEQ ID NO: 4983 - protein, 19 aa, Artificial Sequence
  Cyclic GFR-binding peptide
  MOD_RES (5)..(6): Xaa is C or S
ASKAXXVPTKLNAISILYF

SEQ ID NO: 4984 - protein, 18 aa, Artificial Sequence
  Cyclic GFR-binding peptide
  MOD_RES (4)..(5): Xaa is C or S
AAPXXVPQALNAISILYF

SEQ ID NO: 4985 - protein, 16 aa, Artificial Sequence
  Cyclic GFR-binding peptide
  MOD_RES (2)..(3): Xaa is C or S
AXXAPTKLSPISVLYK

SEQ ID NO: 4986 - protein, 16 aa, Artificial Sequence
  Cyclic GFR-binding peptide
  MOD_RES (3)..(3): Xaa is C or S
PTXAPTKLSPISVLYK

SEQ ID NO: 4987 - protein, 16 aa, Artificial Sequence
  Cyclic GFR-binding peptide
  MOD_RES (2)..(3): Xaa is C or S
AXXAPTKLSPISVLYI

SEQ ID NO: 4988 - protein, 18 aa, Artificial Sequence
  Cyclic GFR-binding peptide
TQLSPISVLYKDDSSNVI

SEQ ID NO: 4989 - protein, 15 aa, Artificial Sequence
  Cyclic GFR-binding peptide
  MOD_RES (1)..(2): Xaa is C or S
XXVSQDLNAISILYF

SEQ ID NO: 4990 - protein, 19 aa, Artificial Sequence
  Cyclic GFR-binding peptide
PQALNAISILYFVGRKPKV

SEQ ID NO: 4991 - protein, 19 aa, Artificial Sequence
  Cyclic GFR-binding peptide
  MOD_RES (5)..(6): Xaa is C or S
VPKPXXAPTKLSPISVLYK

SEQ ID NO: 4992 - protein, 19 aa, Artificial Sequence
  Cyclic GFR-binding peptide
  MOD_RES (5)..(6): Xaa is C or S
VPKPXXAPTKLSPISVLYI

SEQ ID NO: 4993 - protein, 17 aa, Artificial Sequence
  Cyclic GFR-binding peptide
  MOD_RES (3)..(4): Xaa is C or S
KAXXVPTKLSPISVLYI

SEQ ID NO: 4994 - protein, 16 aa, Artificial Sequence
  Cyclic GFR-binding peptide
  MOD_RES (3)..(3): Xaa is C or S
PTXAPTKLSPISVLYI

SEQ ID NO: 4995 - protein, 19 aa, Artificial Sequence
  Cyclic GFR-binding peptide
PTKLSPISVLYIDDSSNVI

SEQ ID NO: 4996 - protein, 17 aa, Artificial Sequence
  Cyclic GFR-binding peptide
ALSPISILYIVGRKPKV

SEQ ID NO: 4997 - protein, 27 aa, Artificial Sequence
  Cyclic GFR-binding peptide
  MOD_RES (6)..(7): Xaa is C or S
KVGKAXXVPTKLEPISVLYLDDMGVPT

SEQ ID NO: 4998 - protein, 27 aa, Artificial Sequence
  Cyclic GFR-binding peptide
  MOD_RES (6)..(7): Xaa is C or S
AAPASXXVPARLNAISILYFDAANNVV

SEQ ID NO: 4999 - protein, 18 aa, Artificial Sequence
  Cyclic GFR-binding peptide
QDLEPISILYLVGRTPKV

SEQ ID NO: 5000 - protein, 15 aa, Artificial Sequence
  Cyclic GFR-binding peptide
NAISMLYFDEYDKVV

SEQ ID NO: 5001 - protein, 27 aa, Artificial Sequence
  Cyclic GFR-binding peptide
  MOD_RES (6)..(7): Xaa is C or S
AVPKAXXAPTKLEPISVLYLDSSNNVI

SEQ ID NO: 5002 - protein, 16 aa, Artificial Sequence
  Cyclic GFR-binding peptide
  MOD_RES (2)..(3): Xaa is C or S
PXXVPQDLSPISILYI

SEQ ID NO: 5003 - protein, 16 aa, Artificial Sequence
  Cyclic GFR-binding peptide
LSPISVLYIDDMGVPT

SEQ ID NO: 5004 - protein, 20 aa, Artificial Sequence
  Cyclic GFR-binding peptide
  MOD_RES (6)..(7): Xaa is C or S
ASASPXXVSQDLNAISILYF

SEQ ID NO: 5005 - protein, 16 aa, Artificial Sequence
  Cyclic GFR-binding peptide
LSPISVLYKDDSSNVI

SEQ ID NO: 5006 - protein, 19 aa, Artificial Sequence
  Cyclic GFR-binding peptide
PTQLSPISVLYIDDSSNVI

SEQ ID NO: 5007 - protein, 16 aa, Artificial Sequence
  Cyclic GFR-binding peptide
LSPISILYKVGRKPKV

SEQ ID NO: 5008 - protein, 13 aa, Artificial Sequence
  Cyclic GFR-binding peptide
VSQDLNAISILYF

SEQ ID NO: 5009 - protein, 16 aa, Artificial Sequence
  Cyclic GFR-binding peptide
  MOD_RES (2)..(3): Xaa is C or S
PXXVPQDLSPISILYK

SEQ ID NO: 5010 - protein, 15 aa, Artificial Sequence
  Cyclic GFR-binding peptide
  MOD_RES (1)..(2): Xaa is C or S
XXVPQALEPISILYL

SEQ ID NO: 5011 - protein, 13 aa, Artificial Sequence
  Cyclic GFR-binding peptide
VSQDLSPISILYI

SEQ ID NO: 5012 - protein, 15 aa, Artificial Sequence
  Cyclic GFR-binding peptide
  MOD_RES (1)..(2): Xaa is C or S
XXVSQDLSPISILYK

SEQ ID NO: 5013 - protein, 27 aa, Artificial Sequence
  Cyclic GFR-binding peptide
  MOD_RES (6)..(7): Xaa is C or S
TVPKPXXAPTQLSPISVLYKDDSSNVI

SEQ ID NO: 5014 - protein, 15 aa, Artificial Sequence
  Cyclic GFR-binding peptide
  MOD_RES (1)..(2): Xaa is C or S
XXVSQDLSPISILYI

SEQ ID NO: 5015 - protein, 20 aa, Artificial Sequence
  Cyclic GFR-binding peptide
  MOD_RES (6)..(7): Xaa is C or S
ASASPXXVSQDLSPISILYI

SEQ ID NO: 5016 - protein, 18 aa, Artificial Sequence
  Cyclic GFR-binding peptide
  MOD_RES (4)..(5): Xaa is C or S
ASPXXVPQDLNAISILYF

SEQ ID NO: 5017 - protein, 18 aa, Artificial Sequence
  Cyclic GFR-binding peptide
  MOD_RES (4)..(5): Xaa is C or S
PASXXVPARLSPISILYK

SEQ ID NO: 5018 - protein, 20 aa, Artificial Sequence
  Cyclic GFR-binding peptide
  MOD_RES (6)..(7): Xaa is C or S
ASASPXXVSQDLSPISILYK

SEQ ID NO: 5019 - protein, 17 aa, Artificial Sequence
  Cyclic GFR-binding peptide
KLSPISVLYIDDMGVPT

SEQ ID NO: 5020 - protein, 17 aa, Artificial Sequence
  Cyclic GFR-binding peptide
  MOD_RES (4)..(4): Xaa is C or S
KPTXAPTKLSPISVLYK

SEQ ID NO: 5021 - protein, 18 aa, Artificial Sequence
  Cyclic GFR-binding peptide
TKLSPISVLYKDDSSNVI

SEQ ID NO: 5022 - protein, 15 aa, Artificial Sequence
  Cyclic GFR-binding peptide
EPISILYLIGKTPKI

SEQ ID NO: 5023 - protein, 17 aa, Artificial Sequence
  Cyclic GFR-binding peptide
  MOD_RES (4)..(4): Xaa is C or S
KPTXAPTKLSPISVLYI

SEQ ID NO: 5024 - protein, 27 aa, Artificial Sequence
  Cyclic GFR-binding peptide
  MOD_RES (6)..(7): Xaa is C or S
ASAAPXXVPQALSPISILYIVGRKPKV

SEQ ID NO: 5025 - protein, 13 aa, Artificial Sequence
  Cyclic GFR-binding peptide
VSQDLSPISILYK

SEQ ID NO: 5026 - protein, 16 aa, Artificial Sequence
  Cyclic GFR-binding peptide
  MOD_RES (2)..(3): Xaa is C or S
PXXVPQDLNAISILYF

SEQ ID NO: 5027 - protein, 16 aa, Artificial Sequence
  Cyclic GFR-binding peptide
LSPISMLYIDEYDKVV

SEQ ID NO: 5028 - protein, 19 aa, Artificial Sequence
  Cyclic GFR-binding peptide
PTKLSPISVLYIDDMGVPT

SEQ ID NO: 5029 - protein, 20 aa, Artificial Sequence
  Cyclic GFR-binding peptide
  MOD_RES (6)..(7): Xaa is C or S
AVPKAXXAPTKLEPISVLYL

SEQ ID NO: 5030 - protein, 16 aa, Artificial Sequence
  Cyclic GFR-binding peptide
LSPISMLYKDEYDKVV

SEQ ID NO: 5031 - protein, 16 aa, Artificial Sequence
  Cyclic GFR-binding peptide
LSPISILYKVGRTPKV

SEQ ID NO: 5032 - protein, 15 aa, Artificial Sequence
  Cyclic GFR-binding peptide
  MOD_RES (1)..(2): Xaa is C or S
XXVPQALSPISILYK

SEQ ID NO: 5033 - protein, 18 aa, Artificial Sequence
  Cyclic GFR-binding peptide
QDLSPISILYKIGKTPKI

SEQ ID NO: 5034 - protein, 16 aa, Artificial Sequence
  Cyclic GFR-binding peptide
  MOD_RES (2)..(3): Xaa is C or S
PXXAPTQLSPISVLYK

SEQ ID NO: 5035 - protein, 16 aa, Artificial Sequence
  Cyclic GFR-binding peptide
  MOD_RES (2)..(3): Xaa is C or S
PXXAPTQLSPISVLYI

SEQ ID NO: 5036 - protein, 18 aa, Artificial Sequence
  Cyclic GFR-binding peptide
QDLSPISILYIIGKTPKI

SEQ ID NO: 5037 - protein, 18 aa, Artificial Sequence
  Cyclic GFR-binding peptide
  MOD_RES (4)..(5): Xaa is C or S
AAPXXVPQALEPISILYL

SEQ ID NO: 5038 - protein, 15 aa, Artificial Sequence
  Cyclic GFR-binding peptide
  MOD_RES (1)..(2): Xaa is C or S
XXVPQALSPISILYI

SEQ ID NO: 5039 - protein, 15 aa, Artificial Sequence
  Cyclic GFR-binding peptide
NAISVLYFDDMGVPT

SEQ ID NO: 5040 - protein, 15 aa, Artificial Sequence
  Cyclic GFR-binding peptide
  MOD_RES (1)..(2): Xaa is C or S
XXVPTKLSPISILYI

SEQ ID NO: 5041 - protein, 15 aa, Artificial Sequence
  Cyclic GFR-binding peptide
  MOD_RES (1)..(2): Xaa is C or S
XXVPTKLSPISILYK

SEQ ID NO: 5042 - protein, 18 aa, Artificial Sequence
  Cyclic GFR-binding peptide
TELNAISMLYFDENEKVV

SEQ ID NO: 5043 - protein, 19 aa, Artificial Sequence
  Cyclic GFR-binding peptide
  MOD_RES (5)..(6): Xaa is C or S
SASPXXVSQDLNAISILYF

SEQ ID NO: 5044 - protein, 17 aa, Artificial Sequence
  Cyclic GFR-binding peptide
  MOD_RES (3)..(4): Xaa is C or S
SPXXVPQDLEPISILYL

SEQ ID NO: 5045 - protein, 19 aa, Artificial Sequence
  Cyclic GFR-binding peptide
SQDLNAISILYFIGKTPKI

SEQ ID NO: 5046 - protein, 16 aa, Artificial Sequence
  Cyclic GFR-binding peptide
LEPISILYLVGRKPKV

SEQ ID NO: 5047 - protein, 18 aa, Artificial Sequence
  Cyclic GFR-binding peptide
QALNAISILYFVGRKPKV

SEQ ID NO: 5048 - protein, 16 aa, Artificial Sequence
  Cyclic GFR-binding peptide
LNAISILYFIGKTPKI

SEQ ID NO: 5049 - protein, 18 aa, Artificial Sequence
  Cyclic GFR-binding peptide
  MOD_RES (4)..(5): Xaa is C or S
AAPXXVPQALSPISILYK

SEQ ID NO: 5050 - protein, 18 aa, Artificial Sequence
  Cyclic GFR-binding peptide
TKLEPISVLYLDDSSNVI

SEQ ID NO: 5051 - protein, 14 aa, Artificial Sequence
  Cyclic GFR-binding peptide
  MOD_RES (1)..(1): Xaa is C or S
XVPARLEPISILYL

SEQ ID NO: 5052 - protein, 19 aa, Artificial Sequence
  Cyclic GFR-binding peptide
PQDLSPISILYIVGRTPKV

SEQ ID NO: 5053 - protein, 18 aa, Artificial Sequence
  Cyclic GFR-binding peptide
  MOD_RES (4)..(5): Xaa is C or S
AAPXXVPQALSPISILYI

SEQ ID NO: 5054 - protein, 27 aa, Artificial Sequence
  Cyclic GFR-binding peptide
  MOD_RES (6)..(7): Xaa is C or S
TVPKPXXAPTQLEPISVLYLDDSSNVI

SEQ ID NO: 5055 - protein, 14 aa, Artificial Sequence
  Cyclic GFR-binding peptide
  MOD_RES (1)..(1): Xaa is C or S
XVPTELEPISMLYL

SEQ ID NO: 5056 - protein, 16 aa, Artificial Sequence
  Cyclic GFR-binding peptide
  MOD_RES (2)..(3): Xaa is C or S
PXXVPQALNAISILYF

SEQ ID NO: 5057 - protein, 18 aa, Artificial Sequence
  Cyclic GFR-binding peptide
ARLSPISILYKDAANNVV

SEQ ID NO: 5058 - protein, 18 aa, Artificial Sequence
  Cyclic GFR-binding peptide
TQLEPISVLYLDDSSNVI

SEQ ID NO: 5059 - protein, 17 aa, Artificial Sequence
  Cyclic GFR-binding peptide
ELEPISMLYLDEYDKVV

SEQ ID NO: 5060 - protein, 16 aa, Artificial Sequence
  Cyclic GFR-binding peptide
  MOD_RES (2)..(3): Xaa is C or S
PXXVSQDLEPISILYL

SEQ ID NO: 5061 - protein, 14 aa, Artificial Sequence
  Cyclic GFR-binding peptide
  MOD_RES (1)..(1): Xaa is C or S
XAPTKLSPISVLYK

SEQ ID NO: 5062 - protein, 14 aa, Artificial Sequence
  Cyclic GFR-binding peptide
  MOD_RES (1)..(1): Xaa is C or S
XAPTKLSPISVLYI

SEQ ID NO: 5063 - protein, 16 aa, Artificial Sequence
  Cyclic GFR-binding peptide
  MOD_RES (2)..(3): Xaa is C or S
PXXVPQALEPISILYL

SEQ ID NO: 5064 - protein, 18 aa, Artificial Sequence
  Cyclic GFR-binding peptide
  MOD_RES (4)..(5): Xaa is C or S
PKPXXAPTQLSPISVLYI

SEQ ID NO: 5065 - protein, 15 aa, Artificial Sequence
  Cyclic GFR-binding peptide
SPISILYKVGRKPKV

SEQ ID NO: 5066 - protein, 20 aa, Artificial Sequence
  Cyclic GFR-binding peptide
  MOD_RES (6)..(7): Xaa is C or S
ASASPXXVPQDLEPISILYL

SEQ ID NO: 5067 - protein, 20 aa, Artificial Sequence
  Cyclic GFR-binding peptide
  MOD_RES (6)..(7): Xaa is C or S
KVGKAXXVPTKLNAISVLYF

SEQ ID NO: 5068 - protein, 18 aa, Artificial Sequence
  Cyclic GFR-binding peptide
  MOD_RES (4)..(5): Xaa is C or S
PKPXXAPTQLSPISVLYK

SEQ ID NO: 5069 - protein, 13 aa, Artificial Sequence
  Cyclic GFR-binding peptide
APTQLSPISVLYI

SEQ ID NO: 5070 - protein, 13 aa, Artificial Sequence
  Cyclic GFR-binding peptide
APTQLSPISVLYK

SEQ ID NO: 5071 - protein, 27 aa, Artificial Sequence
  Cyclic GFR-binding peptide
  MOD_RES (6)..(7): Xaa is C or S
ASASPXXVPQDLSPISILYKVGRTPKV

SEQ ID NO: 5072 - protein, 13 aa, Artificial Sequence
  Cyclic GFR-binding peptide
VPTKLSPISILYI

SEQ ID NO: 5073 - protein, 13 aa, Artificial Sequence
  Cyclic GFR-binding peptide
VPTKLSPISILYK

SEQ ID NO: 5074 - protein, 14 aa, Artificial Sequence
  Cyclic GFR-binding peptide
  MOD_RES (1)..(1): Xaa is C or S
XVPTKLEPISVLYL

SEQ ID NO: 5075 - protein, 19 aa, Artificial Sequence
  Cyclic GFR-binding peptide
PTELSPISMLYIDENEKVV

SEQ ID NO: 5076 - protein, 19 aa, Artificial Sequence
  Cyclic GFR-binding peptide
PTKLSPISVLYKDSSNNVI

SEQ ID NO: 5077 - protein, 27 aa, Artificial Sequence
  Cyclic GFR-binding peptide
  MOD_RES (6)..(7): Xaa is C or S
KASKAXXVPTKLNAISILYFDKGVVTY

SEQ ID NO: 5078 - protein, 19 aa, Artificial Sequence
  Cyclic GFR-binding peptide
PTELSPISMLYKDEYDKVV

SEQ ID NO: 5079 - protein, 16 aa, Artificial Sequence
  Cyclic GFR-binding peptide
  MOD_RES (2)..(3): Xaa is C or S
AXXAPTKLEPISVLYL

SEQ ID NO: 5080 - protein, 17 aa, Artificial Sequence
  Cyclic GFR-binding peptide
  MOD_RES (3)..(4): Xaa is C or S
KAXXAPTKLSPISVLYK

SEQ ID NO: 5081 - protein, 17 aa, Artificial Sequence
  Cyclic GFR-binding peptide
  MOD_RES (3)..(4): Xaa is C or S
KAXXAPTKLSPISVLYI

SEQ ID NO: 5082 - protein, 13 aa, Artificial Sequence
  Cyclic GFR-binding peptide
VPQALSPISILYI

SEQ ID NO: 5083 - protein, 13 aa, Artificial Sequence
  Cyclic GFR-binding peptide
VPQALSPISILYK

SEQ ID NO: 5084 - protein, 15 aa, Artificial Sequence
  Cyclic GFR-binding peptide
  MOD_RES (1)..(2): Xaa is C or S
XXAPTQLSPISVLYI

SEQ ID NO: 5085 - protein, 15 aa, Artificial Sequence
  Cyclic GFR-binding peptide
  MOD_RES (1)..(2): Xaa is C or S
XXAPTQLSPISVLYK

SEQ ID NO: 5086 - protein, 17 aa, Artificial Sequence
  Cyclic GFR-binding peptide
RLEPISILYLDAANNVV

SEQ ID NO: 5087 - protein, 15 aa, Artificial Sequence
  Cyclic GFR-binding peptide
  MOD_RES (1)..(2): Xaa is C or S
XXVPTELNAISMLYF

SEQ ID NO: 5088 - protein, 16 aa, Artificial Sequence
  Cyclic GFR-binding peptide
LNAISILYFDKGVVTY

SEQ ID NO: 5089 - protein, 27 aa, Artificial Sequence
  Cyclic GFR-binding peptide
  MOD_RES (6)..(7): Xaa is C or S
YVPKPXXAPTKLSPISVLYIDDSSNVI

SEQ ID NO: 5090 - protein, 15 aa, Artificial Sequence
  Cyclic GFR-binding peptide
  MOD_RES (1)..(2): Xaa is C or S
XXVSQDLEPISILYL

SEQ ID NO: 5091 - protein, 14 aa, Artificial Sequence
  Cyclic GFR-binding peptide
  MOD_RES (1)..(1): Xaa is C or S
XVPQDLSPISILYI

SEQ ID NO: 5092 - protein, 13 aa, Artificial Sequence
  Cyclic GFR-binding peptide
VSQDLEPISILYL

SEQ ID NO: 5093 - protein, 14 aa, Artificial Sequence
  Cyclic GFR-binding peptide
  MOD_RES (1)..(1): Xaa is C or S
XVPQDLSPISILYK

SEQ ID NO: 5094 - protein, 18 aa, Artificial Sequence
  Cyclic GFR-binding peptide
  MOD_RES (4)..(5): Xaa is C or S
PASXXVPARLEPISILYL

SEQ ID NO: 5095 - protein, 19 aa, Artificial Sequence
  Cyclic GFR-binding peptide
  MOD_RES (6)..(6): Xaa is C or S
VTKPTXAPTKLSPISVLYI

SEQ ID NO: 5096 - protein, 19 aa, Artificial Sequence
  Cyclic GFR-binding peptide
  MOD_RES (6)..(6): Xaa is C or S
VTKPTXAPTKLSPISVLYK

SEQ ID NO: 5097 - protein, 27 aa, Artificial Sequence
  Cyclic GFR-binding peptide
  MOD_RES (6)..(7): Xaa is C or S
TVPKPXXAPTQLSPISVLYIDDSSNVI

SEQ ID NO: 5098 - protein, 18 aa, Artificial Sequence
  Cyclic GFR-binding peptide
  MOD_RES (5)..(5): Xaa is C or S
TKPTXAPTKLSPISVLYI

SEQ ID NO: 5099 - protein, 17 aa, Artificial Sequence
  Cyclic GFR-binding peptide
ELSPISMLYIDEYDKVV

SEQ ID NO: 5100 - protein, 19 aa, Artificial Sequence
  Cyclic GFR-binding peptide
PQALSPISILYIVGRKPKV

SEQ ID NO: 5101 - protein, 18 aa, Artificial Sequence
  Cyclic GFR-binding peptide
  MOD_RES (4)..(5): Xaa is C or S
PKAXXAPTKLSPISVLYK

SEQ ID NO: 5102 - protein, 18 aa, Artificial Sequence
  Cyclic GFR-binding peptide
  MOD_RES (4)..(5): Xaa is C or S
PKAXXAPTKLSPISVLYI

SEQ ID NO: 5103 - protein, 15 aa, Artificial Sequence
  Cyclic GFR-binding peptide
  MOD_RES (1)..(2): Xaa is C or S
XXVPQDLSPISILYI

SEQ ID NO: 5104 - protein, 15 aa, Artificial Sequence
  Cyclic GFR-binding peptide
  MOD_RES (1)..(2): Xaa is C or S
XXVPQDLSPISILYK

SEQ ID NO: 5105 - protein, 20 aa, Artificial Sequence
  Cyclic GFR-binding peptide
  MOD_RES (6)..(7): Xaa is C or S
ASAAPXXVPQALSPISILYI

SEQ ID NO: 5106 - protein, 13 aa, Artificial Sequence
  Cyclic GFR-binding peptide
VPTELNAISMLYF

SEQ ID NO: 5107 - protein, 20 aa, Artificial Sequence
  Cyclic GFR-binding peptide
  MOD_RES (6)..(7): Xaa is C or S
ASAAPXXVPQALSPISILYK

SEQ ID NO: 5108 - protein, 20 aa, Artificial Sequence
  Cyclic GFR-binding peptide
  MOD_RES (6)..(7): Xaa is C or S
KIPKAXXVPTELSPISMLYK

SEQ ID NO: 5109 - protein, 16 aa, Artificial Sequence
  Cyclic GFR-binding peptide
LEPISMLYLDEYDKVV

SEQ ID NO: 5110 - protein, 18 aa, Artificial Sequence
  Cyclic GFR-binding peptide
ARLNAISILYFDAANNVV

SEQ ID NO: 5111 - protein, 20 aa, Artificial Sequence
  Cyclic GFR-binding peptide
  MOD_RES (6)..(7): Xaa is C or S
KIPKAXXVPTELSPISMLYI

SEQ ID NO: 5112 - protein, 16 aa, Artificial Sequence
  Cyclic GFR-binding peptide
  MOD_RES (2)..(3): Xaa is C or S
AXXVPTKLSPISVLYI

SEQ ID NO: 5113 - protein, 18 aa, Artificial Sequence
  Cyclic GFR-binding peptide
  MOD_RES (4)..(5): Xaa is C or S
SKAXXVPTKLNAISILYF

SEQ ID NO: 5114 - protein, 27 aa, Artificial Sequence
  Cyclic GFR-binding peptide
  MOD_RES (6)..(7): Xaa is C or S
AVPKAXXAPTKLSPISVLYIDSSNNVI

SEQ ID NO: 5115 - protein, 18 aa, Artificial Sequence
  Cyclic GFR-binding peptide
QDLEPISILYLIGKTPKI

SEQ ID NO: 5116 - protein, 18 aa, Artificial Sequence
  Cyclic GFR-binding peptide
TKLEPISVLYLDDMGVPT

SEQ ID NO: 5117 - protein, 19 aa, Artificial Sequence
  Cyclic GFR-binding peptide
  MOD_RES (5)..(6): Xaa is C or S
SASPXXVSQDLEPISILYL

SEQ ID NO: 5118 - protein, 15 aa, Artificial Sequence
  Cyclic GFR-binding peptide
EPISILYLDAANNVV

SEQ ID NO: 5119 - protein, 17 aa, Artificial Sequence
  Cyclic GFR-binding peptide
  MOD_RES (3)..(4): Xaa is C or S
KPXXAPTKLSPISVLYI

SEQ ID NO: 5120 - protein, 17 aa, Artificial Sequence
  Cyclic GFR-binding peptide
  MOD_RES (3)..(4): Xaa is C or S
KPXXAPTKLSPISVLYK

SEQ ID NO: 5121 - protein, 17 aa, Artificial Sequence
  Cyclic GFR-binding peptide
  MOD_RES (3)..(4): Xaa is C or S
KPXXAPTQLSPISVLYI

SEQ ID NO: 5122 - protein, 17 aa, Artificial Sequence
  Cyclic GFR-binding peptide
  MOD_RES (3)..(4): Xaa is C or S
KPXXAPTQLSPISVLYK

SEQ ID NO: 5123 - protein, 16 aa, Artificial Sequence
  Cyclic GFR-binding peptide
  MOD_RES (2)..(3): Xaa is C or S
PXXVSQDLNAISILYF

SEQ ID NO: 5124 - protein, 16 aa, Artificial Sequence
  Cyclic GFR-binding peptide
LNAISILYFVGRKPKV

SEQ ID NO: 5125 - protein, 14 aa, Artificial Sequence
  Cyclic GFR-binding peptide
  MOD_RES (1)..(1): Xaa is C or S
XVPQALSPISILYK

SEQ ID NO: 5126 - protein, 14 aa, Artificial Sequence
  Cyclic GFR-binding peptide
  MOD_RES (1)..(1): Xaa is C or S
XVPARLNAISILYF

SEQ ID NO: 5127 - protein, 18 aa, Artificial Sequence
  Cyclic GFR-binding peptide
QALSPISILYKVGRKPKV

SEQ ID NO: 5128 - protein, 19 aa, Artificial Sequence
  Cyclic GFR-binding peptide
PTKLSPISILYKDKGVVTY

SEQ ID NO: 5129 - protein, 14 aa, Artificial Sequence
  Cyclic GFR-binding peptide
  MOD_RES (1)..(1): Xaa is C or S
XVPTELNAISMLYF

SEQ ID NO: 5130 - protein, 14 aa, Artificial Sequence
  Cyclic GFR-binding peptide
  MOD_RES (1)..(1): Xaa is C or S
XVPQALSPISILYI

SEQ ID NO: 5131 - protein, 20 aa, Artificial Sequence
  Cyclic GFR-binding peptide
  MOD_RES (6)..(7): Xaa is C or S
ASASPXXVPQDLNAISILYF

SEQ ID NO: 5132 - protein, 27 aa, Artificial Sequence
  Cyclic GFR-binding peptide
  MOD_RES (6)..(7): Xaa is C or S
KASKAXXVPTKLSPISILYKDKGVVTY

SEQ ID NO: 5133 - protein, 19 aa, Artificial Sequence
  Cyclic GFR-binding peptide
  MOD_RES (5)..(6): Xaa is C or S
VGKAXXVPTKLSPISVLYI

SEQ ID NO: 5134 - protein, 18 aa, Artificial Sequence
  Cyclic GFR-binding peptide
  MOD_RES (5)..(5): Xaa is C or S
TKPTXAPTKLSPISVLYK

SEQ ID NO: 5135 - protein, 27 aa, Artificial Sequence
  Cyclic GFR-binding peptide
  MOD_RES (6)..(7): Xaa is C or S
KVGKAXXVPTKLSPISVLYIDDMGVPT

SEQ ID NO: 5136 - protein, 18 aa, Artificial Sequence
  Cyclic GFR-binding peptide
  MOD_RES (4)..(5): Xaa is C or S
PKPXXAPTKLSPISVLYK

SEQ ID NO: 5137 - protein, 14 aa, Artificial Sequence
  Cyclic GFR-binding peptide
  MOD_RES (1)..(1): Xaa is C or S
XVPTKLNAISVLYF

SEQ ID NO: 5138 - protein, 16 aa, Artificial Sequence
  Cyclic GFR-binding peptide
LSPISVLYKDSSNNVI

SEQ ID NO: 5139 - protein, 27 aa, Artificial Sequence
  Cyclic GFR-binding peptide
  MOD_RES (6)..(7): Xaa is C or S
KIPKAXXVPTELSPISMLYIDENEKVV

SEQ ID NO: 5140 - protein, 18 aa, Artificial Sequence
  Cyclic GFR-binding peptide
  MOD_RES (4)..(5): Xaa is C or S
PKPXXAPTKLSPISVLYI

SEQ ID NO: 5141 - protein, 19 aa, Artificial Sequence
  Cyclic GFR-binding peptide
  MOD_RES (5)..(6): Xaa is C or S
IPKAXXVPTELEPISMLYL

SEQ ID NO: 5142 - protein, 15 aa, Artificial Sequence
  Cyclic GFR-binding peptide
NAISMLYFDENEKVV

SEQ ID NO: 5143 - protein, 15 aa, Artificial Sequence
  Cyclic GFR-binding peptide
SPISILYKIGKTPKI

SEQ ID NO: 5144 - protein, 19 aa, Artificial Sequence
  Cyclic GFR-binding peptide
PTELEPISMLYLDEYDKVV

SEQ ID NO: 5145 - protein, 18 aa, Artificial Sequence
  Cyclic GFR-binding peptide
QDLNAISILYFIGKTPKI

SEQ ID NO: 5146 - protein, 16 aa, Artificial Sequence
  Cyclic GFR-binding peptide
LSPISILYIIGKTPKI

SEQ ID NO: 5147 - protein, 20 aa, Artificial Sequence
  Cyclic GFR-binding peptide
  MOD_RES (7)..(7): Xaa is C or S
HVTKPTXAPTKLSPISVLYK

SEQ ID NO: 5148 - protein, 13 aa, Artificial Sequence
  Cyclic GFR-binding peptide
APTKLSPISVLYK

SEQ ID NO: 5149 - protein, 20 aa, Artificial Sequence
  Cyclic GFR-binding peptide
  MOD_RES (7)..(7): Xaa is C or S
HVTKPTXAPTKLSPISVLYI

SEQ ID NO: 5150 - protein, 13 aa, Artificial Sequence
  Cyclic GFR-binding peptide
APTKLSPISVLYI

SEQ ID NO: 5151 - protein, 18 aa, Artificial Sequence
  Cyclic GFR-binding peptide
TKLNAISVLYFDDMGVPT

SEQ ID NO: 5152 - protein, 17 aa, Artificial Sequence
  Cyclic GFR-binding peptide
KLSPISILYKDKGVVTY

SEQ ID NO: 5153 - protein, 15 aa, Artificial Sequence
  Cyclic GFR-binding peptide
EPISVLYLDDMGVPT

SEQ ID NO: 5154 - protein, 20 aa, Artificial Sequence
  Cyclic GFR-binding peptide
  MOD_RES (6)..(7): Xaa is C or S
YVPKPXXAPTKLEPISVLYL

SEQ ID NO: 5155 - protein, 17 aa, Artificial Sequence
  Cyclic GFR-binding peptide
  MOD_RES (3)..(4): Xaa is C or S
KAXXVPTKLSPISILYK

SEQ ID NO: 5156 - protein, 17 aa, Artificial Sequence
  Cyclic GFR-binding peptide
  MOD_RES (3)..(4): Xaa is C or S
KAXXVPTKLSPISILYI

SEQ ID NO: 5157 - protein, 16 aa, Artificial Sequence
  Cyclic GFR-binding peptide
LSPISILYKDKGVVTY

SEQ ID NO: 5158 - protein, 17 aa, Artificial Sequence
  Cyclic GFR-binding peptide
KLSPISVLYKDSSNNVI

SEQ ID NO: 5159 - protein, 17 aa, Artificial Sequence
  Cyclic GFR-binding peptide
  MOD_RES (3)..(4): Xaa is C or S
SPXXVSQDLNAISILYF

SEQ ID NO: 5160 - protein, 19 aa, Artificial Sequence
  Cyclic GFR-binding peptide
PTELNAISMLYFDEYDKVV

SEQ ID NO: 5161 - protein, 16 aa, Artificial Sequence
  Cyclic GFR-binding peptide
IIQQKDNFYLMNIPSM

SEQ ID NO: 5162 - protein, 16 aa, Artificial Sequence
  Cyclic GFR-binding peptide
  MOD_RES (14)..(15): Xaa is C or S
FYLMNIPSLETPVXXA

SEQ ID NO: 5163 - protein, 13 aa, Artificial Sequence
  Cyclic GFR-binding peptide
FYLVNIPSLKTPA

SEQ ID NO: 5164 - protein, 14 aa, Artificial Sequence
  Cyclic GFR-binding peptide
  MOD_RES (14)..(14): Xaa is C or S
FYLINIPSLKTPVX

SEQ ID NO: 5165 - protein, 27 aa, Artificial Sequence
  Cyclic GFR-binding peptide
  MOD_RES (21)..(22): Xaa is C or S
IVNNSSDFYLVNIPSLKTPAXXAKPVA

SEQ ID NO: 5166 - protein, 16 aa, Artificial Sequence
  Cyclic GFR-binding peptide
  MOD_RES (14)..(15): Xaa is C or S
FYLINIPSLRAPVXXS

SEQ ID NO: 5167 - protein, 17 aa, Artificial Sequence
  Cyclic GFR-binding peptide
IVNSSDDFYLVNIPSLK

SEQ ID NO: 5168 - protein, 15 aa, Artificial Sequence
  Cyclic GFR-binding peptide
  MOD_RES (14)..(15): Xaa is C or S
FYLMNIPSTKVPAXX

SEQ ID NO: 5169 - protein, 14 aa, Artificial Sequence
  Cyclic GFR-binding peptide
  MOD_RES (14)..(14): Xaa is C or S
FYLVNIPSLQTPAX

SEQ ID NO: 5170 - protein, 27 aa, Artificial Sequence
  Cyclic GFR-binding peptide
  MOD_RES (21)..(22): Xaa is C or S
YTVVGKDFYLINIPSLKTPVXXAKSAK

SEQ ID NO: 5171 - protein, 27 aa, Artificial Sequence
  Cyclic GFR-binding peptide
  MOD_RES (21)..(22): Xaa is C or S
TPVGMDDFYLVNIPSLKTPVXXAKGVK

SEQ ID NO: 5172 - protein, 19 aa, Artificial Sequence
  Cyclic GFR-binding peptide
  MOD_RES (14)..(15): Xaa is C or S
FYLMNIPSLETPVXXAKPI

SEQ ID NO: 5173 - protein, 16 aa, Artificial Sequence
  Cyclic GFR-binding peptide
VVKENEDFYLMNIPSL

SEQ ID NO: 5174 - protein, 13 aa, Artificial Sequence
  Cyclic GFR-binding peptide
FYLINIPSLRTPV

SEQ ID NO: 5175 - protein, 19 aa, Artificial Sequence
  Cyclic GFR-binding peptide
IIQQKDNFYLMNIPSMKTP

SEQ ID NO: 5176 - protein, 27 aa, Artificial Sequence
  Cyclic GFR-binding peptide
  MOD_RES (21)..(22): Xaa is C or S
VVKDYEDFYLMNIPSLETPVXXAKPIS

SEQ ID NO: 5177 - protein, 20 aa, Artificial Sequence
  Cyclic GFR-binding peptide
  MOD_RES (14)..(15): Xaa is C or S
FYLINIPSLRAPVXXSAPAA

SEQ ID NO: 5178 - protein, 17 aa, Artificial Sequence
  Cyclic GFR-binding peptide
LLVRGNDFYLMNIPSTK

SEQ ID NO: 5179 - protein, 13 aa, Artificial Sequence
  Cyclic GFR-binding peptide
FYLVNIPSLKTPV

SEQ ID NO: 5180 - protein, 18 aa, Artificial Sequence
  Cyclic GFR-binding peptide
VVKENEDFYLMNIPSLET

SEQ ID NO: 5181 - protein, 17 aa, Artificial Sequence
  Cyclic GFR-binding peptide
  MOD_RES (14)..(15): Xaa is C or S
FYLVNIPSLKTPAXXAK

SEQ ID NO: 5182 - protein, 15 aa, Artificial Sequence
  Cyclic GFR-binding peptide
TPVGMDDFYLVNIPS

SEQ ID NO: 5183 - protein, 15 aa, Artificial Sequence
  Cyclic GFR-binding peptide
  MOD_RES (14)..(15): Xaa is C or S
FYLMNIPSLETPVXX

SEQ ID NO: 5184 - protein, 16 aa, Artificial Sequence
  Cyclic GFR-binding peptide
  MOD_RES (14)..(15): Xaa is C or S
FYLINIPSLRTPVXXT

SEQ ID NO: 5185 - protein, 17 aa, Artificial Sequence
  Cyclic GFR-binding peptide
VVNNASDFYLINIPSLR

SEQ ID NO: 5186 - protein, 27 aa, Artificial Sequence
  Cyclic GFR-binding peptide
  MOD_RES (21)..(22): Xaa is C or S
VVNNAADFYLINIPSLRAPVXXSAPAA

SEQ ID NO: 5187 - protein, 14 aa, Artificial Sequence
  Cyclic GFR-binding peptide
  MOD_RES (14)..(14): Xaa is C or S
FYLINIPSLRTPVX

SEQ ID NO: 5188 - protein, 17 aa, Artificial Sequence
  Cyclic GFR-binding peptide
  MOD_RES (14)..(14): Xaa is C or S
FYLVNIPSLKTPAXTPK

SEQ ID NO: 5189 - protein, 19 aa, Artificial Sequence
  Cyclic GFR-binding peptide
VVKENEDFYLMNIPSLETP

SEQ ID NO: 5190 - protein, 27 aa, Artificial Sequence
  Cyclic GFR-binding peptide
  MOD_RES (21)..(22): Xaa is C or S
VVNNASDFYLINIPSLRTPVXXTPPTS

SEQ ID NO: 5191 - protein, 20 aa, Artificial Sequence
  Cyclic GFR-binding peptide
  MOD_RES (14)..(15): Xaa is C or S
FYLINIPSLKTPVXXAKSAK

SEQ ID NO: 5192 - protein, 13 aa, Artificial Sequence
  Cyclic GFR-binding peptide
FYLINIPSLKTPV

SEQ ID NO: 5193 - protein, 19 aa, Artificial Sequence
  Cyclic GFR-binding peptide
  MOD_RES (14)..(14): Xaa is C or S
FYLVNIPSLKTPAXTPKTV

SEQ ID NO: 5194 - protein, 20 aa, Artificial Sequence
  Cyclic GFR-binding peptide
  MOD_RES (14)..(15): Xaa is C or S
FYLMNIPSLETPVXXAKPIS

SEQ ID NO: 5195 - protein, 17 aa, Artificial Sequence
  Cyclic GFR-binding peptide
  MOD_RES (14)..(15): Xaa is C or S
FYLINIPSLRTPVXXTP

SEQ ID NO: 5196 - protein, 13 aa, Artificial Sequence
  Cyclic GFR-binding peptide
FYLVNIPSLQTPA

SEQ ID NO: 5197 - protein, 16 aa, Artificial Sequence
  Cyclic GFR-binding peptide
  MOD_RES (14)..(15): Xaa is C or S
FYLMNIPSTKVPAXXT

SEQ ID NO: 5198 - protein, 27 aa, Artificial Sequence
  Cyclic GFR-binding peptide
  MOD_RES (21)..(22): Xaa is C or S
IIQQKDNFYLMNIPSMKTPTXXPGASG

SEQ ID NO: 5199 - protein, 20 aa, Artificial Sequence
  Cyclic GFR-binding peptide
  MOD_RES (14)..(15): Xaa is C or S
FYLVNIPSLQTPAXXPKPVT

SEQ ID NO: 5200 - protein, 15 aa, Artificial Sequence
  Cyclic GFR-binding peptide
VVKDYEDFYLMNIPS

SEQ ID NO: 5201 - protein, 20 aa, Artificial Sequence
  Cyclic GFR-binding peptide
  MOD_RES (14)..(15): Xaa is C or S
FYLVNIPSLKTPVXXAKGVK

SEQ ID NO: 5202 - protein, 16 aa, Artificial Sequence
  Cyclic GFR-binding peptide
TPVGMDDFYLVNIPSL

SEQ ID NO: 5203 - protein, 14 aa, Artificial Sequence
  Cyclic GFR-binding peptide
  MOD_RES (14)..(14): Xaa is C or S
FYLVNIPSLKTPVX

SEQ ID NO: 5204 - protein, 17 aa, Artificial Sequence
  Cyclic GFR-binding peptide
TPVGMDDFYLVNIPSLK

SEQ ID NO: 5205 - protein, 18 aa, Artificial Sequence
  Cyclic GFR-binding peptide
  MOD_RES (14)..(15): Xaa is C or S
FYLMNIPSLETPVXXAKP

SEQ ID NO: 5206 - protein, 16 aa, Artificial Sequence
  Cyclic GFR-binding peptide
VVNNAADFYLINIPSL

SEQ ID NO: 5207 - protein, 16 aa, Artificial Sequence
  Cyclic GFR-binding peptide
  MOD_RES (14)..(15): Xaa is C or S
FYLVNIPSLKTPAXXP

SEQ ID NO: 5208 - protein, 18 aa, Artificial Sequence
  Cyclic GFR-binding peptide
  MOD_RES (14)..(14): Xaa is C or S
FYLVNIPSLKTPAXTPKT

SEQ ID NO: 5209 - protein, 15 aa, Artificial Sequence
  Cyclic GFR-binding peptide
VVKENEDFYLMNIPS

SEQ ID NO: 5210 - protein, 20 aa, Artificial Sequence
  Cyclic GFR-binding peptide
  MOD_RES (14)..(15): Xaa is C or S
FYLMNIPSLETPVXXAKPIK

SEQ ID NO: 5211 - protein, 19 aa, Artificial Sequence
  Cyclic GFR-binding peptide
  MOD_RES (14)..(15): Xaa is C or S
FYLVNIPSLKTPAXXAKPV

SEQ ID NO: 5212 - protein, 15 aa, Artificial Sequence
  Cyclic GFR-binding peptide
  MOD_RES (14)..(15): Xaa is C or S
FYLINIPSLRAPVXX

SEQ ID NO: 5213 - protein, 13 aa, Artificial Sequence
  Cyclic GFR-binding peptide
FYLMNIPSTKVPA

SEQ ID NO: 5214 - protein, 19 aa, Artificial Sequence
  Cyclic GFR-binding peptide
YTVVGKDFYLINIPSLKTP

SEQ ID NO: 5215 - protein, 27 aa, Artificial Sequence
  Cyclic GFR-binding peptide
  MOD_RES (21)..(21): Xaa is C or S
IVNSSDDFYLVNIPSLKTPAXTPKTVH

SEQ ID NO: 5216 - protein, 17 aa, Artificial Sequence
  Cyclic GFR-binding peptide
  MOD_RES (14)..(15): Xaa is C or S
FYLVNIPSLQTPAXXPK

SEQ ID NO: 5217 - protein, 15 aa, Artificial Sequence
  Cyclic GFR-binding peptide
LLVRGNDFYLMNIPS

SEQ ID NO: 5218 - protein, 18 aa, Artificial Sequence
  Cyclic GFR-binding peptide
TPVGMDDFYLVNIPSLKT

SEQ ID NO: 5219 - protein, 27 aa, Artificial Sequence
  Cyclic GFR-binding peptide
  MOD_RES (21)..(22): Xaa is C or S
VVKENEDFYLMNIPSLETPVXXAKPIK

SEQ ID NO: 5220 - protein, 18 aa, Artificial Sequence
  Cyclic GFR-binding peptide
IIQQKDNFYLMNIPSMKT

SEQ ID NO: 5221 - protein, 16 aa, Artificial Sequence
  Cyclic GFR-binding peptide
LLVRGNDFYLMNIPST

SEQ ID NO: 5222 - protein, 19 aa, Artificial Sequence
  Cyclic GFR-binding peptide
IVNNSSDFYLVNIPSLKTP

SEQ ID NO: 5223 - protein, 19 aa, Artificial Sequence
  Cyclic GFR-binding peptide
IVNSSDDFYLVNIPSLKTP

SEQ ID NO: 5224 - protein, 14 aa, Artificial Sequence
  Cyclic GFR-binding peptide
  MOD_RES (14)..(14): Xaa is C or S
FYLMNIPSLETPVX

SEQ ID NO: 5225 - protein, 18 aa, Artificial Sequence
  Cyclic GFR-binding peptide
  MOD_RES (14)..(15): Xaa is C or S
FYLMNIPSTKVPAXXTSP

SEQ ID NO: 5226 - protein, 19 aa, Artificial Sequence
  Cyclic GFR-binding peptide
  MOD_RES (14)..(15): Xaa is C or S
FYLVNIPSLQTPAXXPKPV

SEQ ID NO: 5227 - protein, 16 aa, Artificial Sequence
  Cyclic GFR-binding peptide
VVNNASDFYLINIPSL

SEQ ID NO: 5228 - protein, 16 aa, Artificial Sequence
  Cyclic GFR-binding peptide
  MOD_RES (14)..(15): Xaa is C or S
FYLVNIPSLKTPVXXA

SEQ ID NO: 5229 - protein, 15 aa, Artificial Sequence
  Cyclic GFR-binding peptide
YTVVGKDFYLINIPS

SEQ ID NO: 5230 - protein, 17 aa, Artificial Sequence
  Cyclic GFR-binding peptide
IIQQKDNFYLMNIPSMK

SEQ ID NO: 5231 - protein, 18 aa, Artificial Sequence
  Cyclic GFR-binding peptide
  MOD_RES (14)..(15): Xaa is C or S
FYLINIPSLRTPVXXTPP

SEQ ID NO: 5232 - protein, 19 aa, Artificial Sequence
  Cyclic GFR-binding peptide
IVNSSDDFYLVNIPSLQTP

SEQ ID NO: 5233 - protein, 15 aa, Artificial Sequence
  Cyclic GFR-binding peptide
IIQQKDNFYLMNIPS

SEQ ID NO: 5234 - protein, 18 aa, Artificial Sequence
  Cyclic GFR-binding peptide
  MOD_RES (14)..(15): Xaa is C or S
FYLVNIPSLQTPAXXPKP

SEQ ID NO: 5235 - protein, 18 aa, Artificial Sequence
  Cyclic GFR-binding peptide
  MOD_RES (14)..(15): Xaa is C or S
FYLVNIPSLKTPAXXPKP

SEQ ID NO: 5236 - protein, 16 aa, Artificial Sequence
  Cyclic GFR-binding peptide
  MOD_RES (14)..(15): Xaa is C or S
FYLVNIPSLKTPAXXA

SEQ ID NO: 5237 - protein, 19 aa, Artificial Sequence
  Cyclic GFR-binding peptide
VVKDYEDFYLMNIPSLETP

SEQ ID NO: 5238 - protein, 19 aa, Artificial Sequence
  Cyclic GFR-binding peptide
VVNNASDFYLINIPSLRTP

SEQ ID NO: 5239 - protein, 18 aa, Artificial Sequence
  Cyclic GFR-binding peptide
  MOD_RES (14)..(15): Xaa is C or S
FYLINIPSLKTPVXXAKS

SEQ ID NO: 5240 - protein, 18 aa, Artificial Sequence
  Cyclic GFR-binding peptide
VVNNAADFYLINIPSLRA

SEQ ID NO: 5241 - protein, 13 aa, Artificial Sequence
  Cyclic GFR-binding peptide
FYLMNIPSLETPV

SEQ ID NO: 5242 - protein, 16 aa, Artificial Sequence
  Cyclic GFR-binding peptide
  MOD_RES (14)..(15): Xaa is C or S
FYLINIPSLKTPVXXA

SEQ ID NO: 5243 - protein, 13 aa, Artificial Sequence
  Cyclic GFR-binding peptide
FYLINIPSLRAPV

SEQ ID NO: 5244 - protein, 19 aa, Artificial Sequence
  Cyclic GFR-binding peptide
LLVRGNDFYLMNIPSTKVP

SEQ ID NO: 5245 - protein, 17 aa, Artificial Sequence
  Cyclic GFR-binding peptide
VVKENEDFYLMNIPSLE

SEQ ID NO: 5246 - protein, 16 aa, Artificial Sequence
  Cyclic GFR-binding peptide
IVNSSDDFYLVNIPSL

SEQ ID NO: 5247 - protein, 20 aa, Artificial Sequence
  Cyclic GFR-binding peptide
  MOD_RES (14)..(15): Xaa is C or S
FYLVNIPSLKTPAXXPKPVH

SEQ ID NO: 5248 - protein, 15 aa, Artificial Sequence
  Cyclic GFR-binding peptide
  MOD_RES (14)..(15): Xaa is C or S
FYLINIPSLRTPVXX

SEQ ID NO: 5249 - protein, 16 aa, Artificial Sequence
  Cyclic GFR-binding peptide
IVNNSSDFYLVNIPSL

SEQ ID NO: 5250 - protein, 15 aa, Artificial Sequence
  Cyclic GFR-binding peptide
IVNNSSDFYLVNIPS

SEQ ID NO: 5251 - protein, 16 aa, Artificial Sequence
  Cyclic GFR-binding peptide
  MOD_RES (14)..(14): Xaa is C or S
FYLVNIPSLKTPAXTP

SEQ ID NO: 5252 - protein, 15 aa, Artificial Sequence
  Cyclic GFR-binding peptide
  MOD_RES (14)..(15): Xaa is C or S
FYLVNIPSLKTPVXX

SEQ ID NO: 5253 - protein, 15 aa, Artificial Sequence
  Cyclic GFR-binding peptide
IVNSSDDFYLVNIPS

SEQ ID NO: 5254 - protein, 15 aa, Artificial Sequence
  Cyclic GFR-binding peptide
  MOD_RES (14)..(15): Xaa is C or S
FYLVNIPSLKTPAXX

SEQ ID NO: 5255 - protein, 17 aa, Artificial Sequence
  Cyclic GFR-binding peptide
VVNNAADFYLINIPSLR

SEQ ID NO: 5256 - protein, 17 aa, Artificial Sequence
  Cyclic GFR-binding peptide
  MOD_RES (14)..(15): Xaa is C or S
FYLMNIPSLETPVXXAK

SEQ ID NO: 5257 - protein, 15 aa, Artificial Sequence
  Cyclic GFR-binding peptide
  MOD_RES (14)..(15): Xaa is C or S
FYLINIPSLKTPVXX

SEQ ID NO: 5258 - skipped

SEQ ID NO: 5259 - protein, 18 aa, Artificial Sequence
  Cyclic GFR-binding peptide
  MOD_RES (14)..(15): Xaa is C or S
FYLVNIPSLKTPVXXAKG

SEQ ID NO: 5260 - protein, 19 aa, Artificial Sequence
  Cyclic GFR-binding peptide
  MOD_RES (14)..(15): Xaa is C or S
FYLMNIPSTKVPAXXTSPV

SEQ ID NO: 5261 - protein, 15 aa, Artificial Sequence
  Cyclic GFR-binding peptide
  MOD_RES (14)..(15): Xaa is C or S
FYLVNIPSLQTPAXX

SEQ ID NO: 5262 - protein, 18 aa, Artificial Sequence
  Cyclic GFR-binding peptide
VVNNASDFYLINIPSLRT

SEQ ID NO: 5263 - protein, 19 aa, Artificial Sequence
  Cyclic GFR-binding peptide
VVNNAADFYLINIPSLRAP

SEQ ID NO: 5264 - protein, 17 aa, Artificial Sequence
  Cyclic GFR-binding peptide
  MOD_RES (14)..(15): Xaa is C or S
FYLMNIPSTKVPAXXTS

SEQ ID NO: 5265 - protein, 15 aa, Artificial Sequence
  Cyclic GFR-binding peptide
  MOD_RES (14)..(14): Xaa is C or S
FYLVNIPSLKTPAXT

SEQ ID NO: 5266 - protein, 27 aa, Artificial Sequence
  Cyclic GFR-binding peptide
  MOD_RES (21)..(22): Xaa is C or S
IVNSSDDFYLVNIPSLKTPAXXPKPVH

SEQ ID NO: 5267 - protein, 16 aa, Artificial Sequence
  Cyclic GFR-binding peptide
  MOD_RES (14)..(15): Xaa is C or S
FYLVNIPSLQTPAXXP

SEQ ID NO: 5268 - protein, 18 aa, Artificial Sequence
  Cyclic GFR-binding peptide
IVNNSSDFYLVNIPSLKT

SEQ ID NO: 5269 - protein, 20 aa, Artificial Sequence
  Cyclic GFR-binding peptide
  MOD_RES (14)..(15): Xaa is C or S
FYLVNIPSLKTPAXXPKPVY

SEQ ID NO: 5270 - protein, 18 aa, Artificial Sequence
  Cyclic GFR-binding peptide
  MOD_RES (14)..(15): Xaa is C or S
FYLVNIPSLKTPAXXAKP

SEQ ID NO: 5271 - protein, 18 aa, Artificial Sequence
  Cyclic GFR-binding peptide
  MOD_RES (14)..(15): Xaa is C or S
FYLINIPSLRAPVXXSAP

SEQ ID NO: 5272 - protein, 19 aa, Artificial Sequence
  Cyclic GFR-binding peptide
  MOD_RES (14)..(15): Xaa is C or S
FYLINIPSLRAPVXXSAPA

SEQ ID NO: 5273 - protein, 14 aa, Artificial Sequence
  Cyclic GFR-binding peptide
  MOD_RES (14)..(14): Xaa is C or S
FYLMNIPSTKVPAX

SEQ ID NO: 5274 - protein, 17 aa, Artificial Sequence
  Cyclic GFR-binding peptide
  MOD_RES (14)..(15): Xaa is C or S
FYLINIPSLKTPVXXAK

SEQ ID NO: 5275 - protein, 16 aa, Artificial Sequence
  Cyclic GFR-binding peptide
VVKDYEDFYLMNIPSL

SEQ ID NO: 5276 - protein, 18 aa, Artificial Sequence
  Cyclic GFR-binding peptide
LLVRGNDFYLMNIPSTKV

SEQ ID NO: 5277 - protein, 17 aa, Artificial Sequence
  Cyclic GFR-binding peptide
IVNSSDDFYLVNIPSLQ

SEQ ID NO: 5278 - protein, 17 aa, Artificial Sequence
  Cyclic GFR-binding peptide
YTVVGKDFYLINIPSLK

SEQ ID NO: 5279 - protein, 17 aa, Artificial Sequence
  Cyclic GFR-binding peptide
  MOD_RES (14)..(15): Xaa is C or S
FYLVNIPSLKTPAXXPK

SEQ ID NO: 5280 - protein, 27 aa, Artificial Sequence
  Cyclic GFR-binding peptide
  MOD_RES (21)..(22): Xaa is C or S
IVNSSDDFYLVNIPSLQTPAXXPKPVT

SEQ ID NO: 5281 - protein, 20 aa, Artificial Sequence
  Cyclic GFR-binding peptide
  MOD_RES (14)..(15): Xaa is C or S
FYLINIPSLRTPVXXTPPTS

SEQ ID NO: 5282 - protein, 27 aa, Artificial Sequence
  Cyclic GFR-binding peptide
  MOD_RES (21)..(22): Xaa is C or S
LLVRGNDFYLMNIPSTKVPAXXTSPVR

SEQ ID NO: 5283 - protein, 18 aa, Artificial Sequence
  Cyclic GFR-binding peptide
YTVVGKDFYLINIPSLKT

SEQ ID NO: 5284 - protein, 17 aa, Artificial Sequence
  Cyclic GFR-binding peptide
VVKDYEDFYLMNIPSLE

SEQ ID NO: 5285 - protein, 19 aa, Artificial Sequence
  Cyclic GFR-binding peptide
  MOD_RES (14)..(15): Xaa is C or S
FYLVNIPSLKTPVXXAKGV

SEQ ID NO: 5286 - protein, 17 aa, Artificial Sequence
  Cyclic GFR-binding peptide
  MOD_RES (14)..(15): Xaa is C or S
FYLINIPSLRAPVXXSA

SEQ ID NO: 5287 - protein, 18 aa, Artificial Sequence
  Cyclic GFR-binding peptide
IVNSSDDFYLVNIPSLQT

SEQ ID NO: 5288 - protein, 15 aa, Artificial Sequence
  Cyclic GFR-binding peptide
VVNNAADFYLINIPS

SEQ ID NO: 5289 - protein, 18 aa, Artificial Sequence
  Cyclic GFR-binding peptide
IVNSSDDFYLVNIPSLKT

SEQ ID NO: 5290 - protein, 17 aa, Artificial Sequence
  Cyclic GFR-binding peptide
IVNNSSDFYLVNIPSLK

SEQ ID NO: 5291 - protein, 14 aa, Artificial Sequence
  Cyclic GFR-binding peptide
  MOD_RES (14)..(14): Xaa is C or S
FYLVNIPSLKTPAX

SEQ ID NO: 5292 - protein, 18 aa, Artificial Sequence
  Cyclic GFR-binding peptide
VVKDYEDFYLMNIPSLET

SEQ ID NO: 5293 - protein, 15 aa, Artificial Sequence
  Cyclic GFR-binding peptide
VVNNASDFYLINIPS

SEQ ID NO: 5294 - protein, 16 aa, Artificial Sequence
  Cyclic GFR-binding peptide
YTVVGKDFYLINIPSL

SEQ ID NO: 5295 - protein, 20 aa, Artificial Sequence
  Cyclic GFR-binding peptide
  MOD_RES (14)..(14): Xaa is C or S
FYLVNIPSLKTPAXTPKTVH

SEQ ID NO: 5296 - protein, 20 aa, Artificial Sequence
  Cyclic GFR-binding peptide
  MOD_RES (14)..(15): Xaa is C or S
FYLVNIPSLKTPAXXAKPVA

SEQ ID NO: 5297 - protein, 14 aa, Artificial Sequence
  Cyclic GFR-binding peptide
  MOD_RES (14)..(14): Xaa is C or S
FYLINIPSLRAPVX

SEQ ID NO: 5298 - protein, 19 aa, Artificial Sequence
  Cyclic GFR-binding peptide
  MOD_RES (14)..(15): Xaa is C or S
FYLINIPSLRTPVXXTPPT

SEQ ID NO: 5299 - protein, 19 aa, Artificial Sequence
  Cyclic GFR-binding peptide
TPVGMDDFYLVNIPSLKTP

SEQ ID NO: 5300 - protein, 27 aa, Artificial Sequence
  Cyclic GFR-binding peptide
  MOD_RES (21)..(22): Xaa is C or S
IVNSSDDFYLVNIPSLKTPAXXPKPVY

SEQ ID NO: 5301 - protein, 19 aa, Artificial Sequence
  Cyclic GFR-binding peptide
  MOD_RES (14)..(15): Xaa is C or S
FYLVNIPSLKTPAXXPKPV

SEQ ID NO: 5302 - protein, 19 aa, Artificial Sequence
  Cyclic GFR-binding peptide
  MOD_RES (14)..(15): Xaa is C or S
FYLINIPSLKTPVXXAKSA

SEQ ID NO: 5303 - protein, 17 aa, Artificial Sequence
  Cyclic GFR-binding peptide
  MOD_RES (14)..(15): Xaa is C or S
FYLVNIPSLKTPVXXAK

SEQ ID NO: 5304 - protein, 20 aa, Artificial Sequence
  Cyclic GFR-binding peptide
  MOD_RES (14)..(15): Xaa is C or S
FYLMNIPSTKVPAXXTSPVR

SEQ ID NO: 5305 - protein, 16 aa, Artificial Sequence
  Cyclic GFR-binding peptide
  MOD_RES (2)..(3): Xaa is C or S
AXXVPTELSPINMLYF

SEQ ID NO: 5306 - protein, 13 aa, Artificial Sequence
  Cyclic GFR-binding peptide
APTKLSPINVLYF

SEQ ID NO: 5307 - protein, 14 aa, Artificial Sequence
  Cyclic GFR-binding peptide
  MOD_RES (1)..(1): Xaa is C or S
XVPTKLSPINILYF

SEQ ID NO: 5308 - protein, 27 aa, Artificial Sequence
  Cyclic GFR-binding peptide
  MOD_RES (6)..(7): Xaa is C or S
AVPKAXXAPTKLSPINVLYFDSSNNVI

SEQ ID NO: 5309 - protein, 16 aa, Artificial Sequence
  Cyclic GFR-binding peptide
  MOD_RES (2)..(3): Xaa is C or S
SXXVPARLSPINILYF

SEQ ID NO: 5310 - protein, 17 aa, Artificial Sequence
  Cyclic GFR-binding peptide
KLSPINVLYFDDSSNVI

SEQ ID NO: 5311 - protein, 15 aa, Artificial Sequence
  Cyclic GFR-binding peptide
  MOD_RES (1)..(2): Xaa is C or S
XXAPVKTSPINMLYF

SEQ ID NO: 5312 - protein, 14 aa, Artificial Sequence
  Cyclic GFR-binding peptide
  MOD_RES (1)..(1): Xaa is C or S
XAPTQLSPINVLYF

SEQ ID NO: 5313 - protein, 27 aa, Artificial Sequence
  Cyclic GFR-binding peptide
  MOD_RES (6)..(7): Xaa is C or S
KASKAXXVPTKLSPINILYFDKGVVTY

SEQ ID NO: 5314 - protein, 27 aa, Artificial Sequence
  Cyclic GFR-binding peptide
  MOD_RES (6)..(7): Xaa is C or S
KVGKAXXVPTKLSPINVLYFDDMGVPT

SEQ ID NO: 5315 - protein, 19 aa, Artificial Sequence
  Cyclic GFR-binding peptide
  MOD_RES (5)..(6): Xaa is C or S
IPKAXXVPTELSPINMLYF

SEQ ID NO: 5316 - protein, 16 aa, Artificial Sequence
  Cyclic GFR-binding peptide
LSPINMLYFDENEKVV

SEQ ID NO: 5317 - protein, 13 aa, Artificial Sequence
  Cyclic GFR-binding peptide
VPTRLSPINILYF

SEQ ID NO: 5318 - protein, 27 aa, Artificial Sequence
  Cyclic GFR-binding peptide
  MOD_RES (6)..(7): Xaa is C or S
SIPKAXXVPTELSPINMLYFDEYDKVV

SEQ ID NO: 5319 - protein, 20 aa, Artificial Sequence
  Cyclic GFR-binding peptide
  MOD_RES (6)..(7): Xaa is C or S
AAPASXXVPARLSPINILYF

SEQ ID NO: 5320 - protein, 17 aa, Artificial Sequence
  Cyclic GFR-binding peptide
KTSPINMLYFDNGRVLL

SEQ ID NO: 5321 - protein, 13 aa, Artificial Sequence
  Cyclic GFR-binding peptide
VPTKLSPINVLYF

SEQ ID NO: 5322 - protein, 18 aa, Artificial Sequence
  Cyclic GFR-binding peptide
TELSPINMLYFDENEKVV

SEQ ID NO: 5323 - protein, 17 aa, Artificial Sequence
  Cyclic GFR-binding peptide
  MOD_RES (3)..(4): Xaa is C or S
KAXXAPTKLSPINVLYF

SEQ ID NO: 5324 - protein, 15 aa, Artificial Sequence
  Cyclic GFR-binding peptide
SPINVLYFDDMGVPT

SEQ ID NO: 5325 - protein, 15 aa, Artificial Sequence
  Cyclic GFR-binding peptide
  MOD_RES (1)..(2): Xaa is C or S
XXVPTELSPINMLYF

SEQ ID NO: 5326 - protein, 16 aa, Artificial Sequence
  Cyclic GFR-binding peptide
  MOD_RES (2)..(3): Xaa is C or S
TXXVPTRLSPINILYF

SEQ ID NO: 5327 - protein, 17 aa, Artificial Sequence
  Cyclic GFR-binding peptide
RLSPINILYFDSANNVV

SEQ ID NO: 5328 - protein, 27 aa, Artificial Sequence
  Cyclic GFR-binding peptide
  MOD_RES (6)..(7): Xaa is C or S
AAPASXXVPARLSPINILYFDAANNVV

SEQ ID NO: 5329 - protein, 14 aa, Artificial Sequence
  Cyclic GFR-binding peptide
  MOD_RES (1)..(1): Xaa is C or S
XVPTRLSPINILYF

SEQ ID NO: 5330 - protein, 17 aa, Artificial Sequence
  Cyclic GFR-binding peptide
  MOD_RES (4)..(4): Xaa is C or S
KPTXAPTKLSPINVLYF

SEQ ID NO: 5331 - protein, 19 aa, Artificial Sequence
  Cyclic GFR-binding peptide
PTELSPINMLYFDENEKVV

SEQ ID NO: 5332 - protein, 27 aa, Artificial Sequence
  Cyclic GFR-binding peptide
  MOD_RES (6)..(7): Xaa is C or S
STPPTXXVPTRLSPINILYFDSANNVV

SEQ ID NO: 5333 - protein, 20 aa, Artificial Sequence
  Cyclic GFR-binding peptide
  MOD_RES (6)..(7): Xaa is C or S
KASKAXXVPTKLSPINILYF

SEQ ID NO: 5334 - protein, 13 aa, Artificial Sequence
  Cyclic GFR-binding peptide
VPTKLSPINILYF

SEQ ID NO: 5335 - protein, 19 aa, Artificial Sequence
  Cyclic GFR-binding peptide
  MOD_RES (6)..(6): Xaa is C or S
VTKPTXAPTKLSPINVLYF

SEQ ID NO: 5336 - protein, 20 aa, Artificial Sequence
  Cyclic GFR-binding peptide
  MOD_RES (6)..(7): Xaa is C or S
SIPKAXXVPTELSPINMLYF

SEQ ID NO: 5337 - protein, 17 aa, Artificial Sequence
  Cyclic GFR-binding peptide
  MOD_RES (3)..(4): Xaa is C or S
PTXXVPTRLSPINILYF

SEQ ID NO: 5338 - protein, 13 aa, Artificial Sequence
  Cyclic GFR-binding peptide
APTQLSPINVLYF

SEQ ID NO: 5339 - protein, 16 aa, Artificial Sequence
  Cyclic GFR-binding peptide
  MOD_RES (2)..(3): Xaa is C or S
TXXAPVKTSPINMLYF

SEQ ID NO: 5340 - protein, 20 aa, Artificial Sequence
  Cyclic GFR-binding peptide
  MOD_RES (6)..(7): Xaa is C or S
TVPKPXXAPTQLSPINVLYF

SEQ ID NO: 5341 - protein, 15 aa, Artificial Sequence
  Cyclic GFR-binding peptide
SPINMLYFDEYDKVV

SEQ ID NO: 5342 - protein, 20 aa, Artificial Sequence
  Cyclic GFR-binding peptide
  MOD_RES (6)..(7): Xaa is C or S
KVGKAXXVPTKLSPINVLYF

SEQ ID NO: 5343 - protein, 16 aa, Artificial Sequence
  Cyclic GFR-binding peptide
LSPINVLYFDDMGVPT

SEQ ID NO: 5344 - protein, 14 aa, Artificial Sequence
  Cyclic GFR-binding peptide
  MOD_RES (1)..(1): Xaa is C or S
XVPTKLSPINVLYF

SEQ ID NO: 5345 - protein, 17 aa, Artificial Sequence
  Cyclic GFR-binding peptide
KLSPINVLYFDDMGVPT

SEQ ID NO: 5346 - protein, 18 aa, Artificial Sequence
  Cyclic GFR-binding peptide
  MOD_RES (4)..(5): Xaa is C or S
PKAXXVPTELSPINMLYF

SEQ ID NO: 5347 - protein, 16 aa, Artificial Sequence
  Cyclic GFR-binding peptide
LSPINILYFDAANNVV

SEQ ID NO: 5348 - protein, 16 aa, Artificial Sequence
  Cyclic GFR-binding peptide
  MOD_RES (2)..(3): Xaa is C or S
PXXAPTKLSPINVLYF

SEQ ID NO: 5349 - protein, 18 aa, Artificial Sequence
  Cyclic GFR-binding peptide
  MOD_RES (5)..(5): Xaa is C or S
TKPTXAPTKLSPINVLYF

SEQ ID NO: 5350 - protein, 15 aa, Artificial Sequence
  Cyclic GFR-binding peptide
SPINMLYFDENEKVV

SEQ ID NO: 5351 - protein, 20 aa, Artificial Sequence
  Cyclic GFR-binding peptide
  MOD_RES (6)..(7): Xaa is C or S
KIPKAXXVPTELSPINMLYF

SEQ ID NO: 5352 - protein, 19 aa, Artificial Sequence
  Cyclic GFR-binding peptide
  MOD_RES (5)..(6): Xaa is C or S
VPKAXXAPTKLSPINVLYF

SEQ ID NO: 5353 - protein, 15 aa, Artificial Sequence
  Cyclic GFR-binding peptide
  MOD_RES (1)..(2): Xaa is C or S
XXVPARLSPINILYF

SEQ ID NO: 5354 - protein, 13 aa, Artificial Sequence
  Cyclic GFR-binding peptide
APVKTSPINMLYF

SEQ ID NO: 5355 - protein, 19 aa, Artificial Sequence
  Cyclic GFR-binding peptide
PTKLSPINILYFDKGVVTY

SEQ ID NO: 5356 - protein, 27 aa, Artificial Sequence
  Cyclic GFR-binding peptide
  MOD_RES (7)..(7): Xaa is C or S
HVTKPTXAPTKLSPINVLYFDDSSNVI

SEQ ID NO: 5357 - protein, 17 aa, Artificial Sequence
  Cyclic GFR-binding peptide
  MOD_RES (3)..(4): Xaa is C or S
KPXXAPTQLSPINVLYF

SEQ ID NO: 5358 - protein, 15 aa, Artificial Sequence
  Cyclic GFR-binding peptide
SPINMLYFDNGRVLL

SEQ ID NO: 5359 - protein, 18 aa, Artificial Sequence
  Cyclic GFR-binding peptide
TKLSPINVLYFDDMGVPT

SEQ ID NO: 5360 - protein, 27 aa, Artificial Sequence
  Cyclic GFR-binding peptide
  MOD_RES (6)..(7): Xaa is C or S
KIPKAXXVPTELSPINMLYFDENEKVV

SEQ ID NO: 5361 - protein, 16 aa, Artificial Sequence
  Cyclic GFR-binding peptide
TSPINMLYFDNGRVLL

SEQ ID NO: 5362 - protein, 19 aa, Artificial Sequence
  Cyclic GFR-binding peptide
PTKLSPINVLYFDSSNNVI

SEQ ID NO: 5363 - protein, 19 aa, Artificial Sequence
  Cyclic GFR-binding peptide
PTKLSPINVLYFDDSSNVI

SEQ ID NO: 5364 - protein, 14 aa, Artificial Sequence
  Cyclic GFR-binding peptide
  MOD_RES (1)..(1): Xaa is C or S
XVPTELSPINMLYF

SEQ ID NO: 5365 - protein, 18 aa, Artificial Sequence
  Cyclic GFR-binding peptide
  MOD_RES (4)..(5): Xaa is C or S
PSTXXAPVKTSPINMLYF

SEQ ID NO: 5366 - protein, 19 aa, Artificial Sequence
  Cyclic GFR-binding peptide
  MOD_RES (5)..(6): Xaa is C or S
VPKPXXAPTQLSPINVLYF

SEQ ID NO: 5367 - protein, 16 aa, Artificial Sequence
  Cyclic GFR-binding peptide
LSPINILYFDSANNVV

SEQ ID NO: 5368 - protein, 16 aa, Artificial Sequence
  Cyclic GFR-binding peptide
  MOD_RES (2)..(3): Xaa is C or S
AXXVPTKLSPINVLYF

SEQ ID NO: 5369 - protein, 15 aa, Artificial Sequence
  Cyclic GFR-binding peptide
SPINILYFDKGVVTY

SEQ ID NO: 5370 - protein, 18 aa, Artificial Sequence
  Cyclic GFR-binding peptide
  MOD_RES (4)..(5): Xaa is C or S
PPTXXVPTRLSPINILYF

SEQ ID NO: 5371 - protein, 19 aa, Artificial Sequence
  Cyclic GFR-binding peptide
PTQLSPINVLYFDDSSNVI

SEQ ID NO: 5372 - protein, 18 aa, Artificial Sequence
  Cyclic GFR-binding peptide
  MOD_RES (4)..(5): Xaa is C or S
PKPXXAPTQLSPINVLYF

SEQ ID NO: 5373 - protein, 18 aa, Artificial Sequence
  Cyclic GFR-binding peptide
  MOD_RES (4)..(5): Xaa is C or S
PKPXXAPTKLSPINVLYF

SEQ ID NO: 5374 - protein, 16 aa, Artificial Sequence
  Cyclic GFR-binding peptide
  MOD_RES (2)..(3): Xaa is C or S
AXXAPTKLSPINVLYF

SEQ ID NO: 5375 - protein, 19 aa, Artificial Sequence
  Cyclic GFR-binding peptide
PTELSPINMLYFDEYDKVV

SEQ ID NO: 5376 - protein, 19 aa, Artificial Sequence
  Cyclic GFR-binding peptide
PTRLSPINILYFDSANNVV

SEQ ID NO: 5377 - protein, 18 aa, Artificial Sequence
  Cyclic GFR-binding peptide
  MOD_RES (4)..(5): Xaa is C or S
SKAXXVPTKLSPINILYF

SEQ ID NO: 5378 - protein, 18 aa, Artificial Sequence
  Cyclic GFR-binding peptide
ARLSPINILYFDAANNVV

SEQ ID NO: 5379 - protein, 13 aa, Artificial Sequence
  Cyclic GFR-binding peptide
VPTELSPINMLYF

SEQ ID NO: 5380 - protein, 16 aa, Artificial Sequence
  Cyclic GFR-binding peptide
  MOD_RES (2)..(3): Xaa is C or S
AXXVPTKLSPINILYF

SEQ ID NO: 5381 - protein, 13 aa, Artificial Sequence
  Cyclic GFR-binding peptide
VPARLSPINILYF

SEQ ID NO: 5382 - protein, 19 aa, Artificial Sequence
  Cyclic GFR-binding peptide
PVKTSPINMLYFDNGRVLL

SEQ ID NO: 5383 - protein, 17 aa, Artificial Sequence
  Cyclic GFR-binding peptide
ELSPINMLYFDENEKVV

SEQ ID NO: 5384 - protein, 16 aa, Artificial Sequence
  Cyclic GFR-binding peptide
LSPINVLYFDDSSNVI

SEQ ID NO: 5385 - protein, 20 aa, Artificial Sequence
  Cyclic GFR-binding peptide
  MOD_RES (6)..(7): Xaa is C or S
HVPKPXXAPTKLSPINVLYF

SEQ ID NO: 5386 - protein, 15 aa, Artificial Sequence
  Cyclic GFR-binding peptide
  MOD_RES (1)..(2): Xaa is C or S
XXVPTRLSPINILYF

SEQ ID NO: 5387 - protein, 16 aa, Artificial Sequence
  Cyclic GFR-binding peptide
LSPINVLYFDSSNNVI

SEQ ID NO: 5388 - protein, 15 aa, Artificial Sequence
  Cyclic GFR-binding peptide
SPINVLYFDSSNNVI

SEQ ID NO: 5389 - protein, 16 aa, Artificial Sequence
  Cyclic GFR-binding peptide
  MOD_RES (3)..(3): Xaa is C or S
PTXAPTKLSPINVLYF

SEQ ID NO: 5390 - protein, 15 aa, Artificial Sequence
  Cyclic GFR-binding peptide
  MOD_RES (1)..(2): Xaa is C or S
XXVPTKLSPINVLYF

SEQ ID NO: 5391 - protein, 15 aa, Artificial Sequence
  Cyclic GFR-binding peptide
SPINVLYFDDSSNVI

SEQ ID NO: 5392 - protein, 15 aa, Artificial Sequence
  Cyclic GFR-binding peptide
  MOD_RES (1)..(2): Xaa is C or S
XXAPTKLSPINVLYF

SEQ ID NO: 5393 - protein, 17 aa, Artificial Sequence
  Cyclic GFR-binding peptide
RLSPINILYFDAANNVV

SEQ ID NO: 5394 - protein, 17 aa, Artificial Sequence
  Cyclic GFR-binding peptide
  MOD_RES (3)..(4): Xaa is C or S
KAXXVPTELSPINMLYF

SEQ ID NO: 5395 - protein, 15 aa, Artificial Sequence
  Cyclic GFR-binding peptide
  MOD_RES (1)..(2): Xaa is C or S
XXVPTKLSPINILYF

SEQ ID NO: 5396 - skipped

SEQ ID NO: 5397 - protein, 18 aa, Artificial Sequence
  Cyclic GFR-binding peptide
  MOD_RES (4)..(5): Xaa is C or S
GKAXXVPTKLSPINVLYF

SEQ ID NO: 5398 - protein, 19 aa, Artificial Sequence
  Cyclic GFR-binding peptide
  MOD_RES (5)..(6): Xaa is C or S
VPSTXXAPVKTSPINMLYF

SEQ ID NO: 5399 - protein, 15 aa, Artificial Sequence
  Cyclic GFR-binding peptide
  MOD_RES (1)..(2): Xaa is C or S
XXAPTQLSPINVLYF

SEQ ID NO: 5400 - protein, 18 aa, Artificial Sequence
  Cyclic GFR-binding peptide
TRLSPINILYFDSANNVV

SEQ ID NO: 5401 - protein, 19 aa, Artificial Sequence
  Cyclic GFR-binding peptide
PARLSPINILYFDAANNVV

SEQ ID NO: 5402 - protein, 17 aa, Artificial Sequence
  Cyclic GFR-binding peptide
  MOD_RES (3)..(4): Xaa is C or S
STXXAPVKTSPINMLYF

SEQ ID NO: 5403 - protein, 15 aa, Artificial Sequence
  Cyclic GFR-binding peptide
  MOD_RES (2)..(2): Xaa is C or S
TXAPTKLSPINVLYF

SEQ ID NO: 5404 - protein, 27 aa, Artificial Sequence
  Cyclic GFR-binding peptide
  MOD_RES (6)..(7): Xaa is C or S
HVPKPXXAPTKLSPINVLYFDDSSNVI

SEQ ID NO: 5405 - protein, 16 aa, Artificial Sequence
  Cyclic GFR-binding peptide
  MOD_RES (2)..(3): Xaa is C or S
PXXAPTQLSPINVLYF

SEQ ID NO: 5406 - protein, 18 aa, Artificial Sequence
  Cyclic GFR-binding peptide
TKLSPINVLYFDSSNNVI

SEQ ID NO: 5407 - protein, 20 aa, Artificial Sequence
  Cyclic GFR-binding peptide
  MOD_RES (6)..(7): Xaa is C or S
YVPKPXXAPTKLSPINVLYF

SEQ ID NO: 5408 - protein, 18 aa, Artificial Sequence
  Cyclic GFR-binding peptide
  MOD_RES (4)..(5): Xaa is C or S
PKAXXAPTKLSPINVLYF

SEQ ID NO: 5409 - protein, 18 aa, Artificial Sequence
  Cyclic GFR-binding peptide
  MOD_RES (4)..(5): Xaa is C or S
PASXXVPARLSPINILYF

SEQ ID NO: 5410 - protein, 19 aa, Artificial Sequence
  Cyclic GFR-binding peptide
  MOD_RES (5)..(6): Xaa is C or S
APASXXVPARLSPINILYF

SEQ ID NO: 5411 - protein, 14 aa, Artificial Sequence
  Cyclic GFR-binding peptide
  MOD_RES (1)..(1): Xaa is C or S
XAPVKTSPINMLYF

SEQ ID NO: 5412 - protein, 17 aa, Artificial Sequence
  Cyclic GFR-binding peptide
  MOD_RES (3)..(4): Xaa is C or S
KAXXVPTKLSPINILYF

SEQ ID NO: 5413 - protein, 16 aa, Artificial Sequence
  Cyclic GFR-binding peptide
LSPINMLYFDEYDKVV

SEQ ID NO: 5414 - protein, 18 aa, Artificial Sequence
  Cyclic GFR-binding peptide
VKTSPINMLYFDNGRVLL

SEQ ID NO: 5415 - protein, 17 aa, Artificial Sequence
  Cyclic GFR-binding peptide
QLSPINVLYFDDSSNVI

SEQ ID NO: 5416 - protein, 17 aa, Artificial Sequence
  Cyclic GFR-binding peptide
KLSPINILYFDKGVVTY

SEQ ID NO: 5417 - protein, 17 aa, Artificial Sequence
  Cyclic GFR-binding peptide
  MOD_RES (3)..(4): Xaa is C or S
KPXXAPTKLSPINVLYF

SEQ ID NO: 5418 - protein, 27 aa, Artificial Sequence
  Cyclic GFR-binding peptide
  MOD_RES (6)..(7): Xaa is C or S
TVPKPXXAPTQLSPINVLYFDDSSNVI

SEQ ID NO: 5419 - protein, 20 aa, Artificial Sequence
  Cyclic GFR-binding peptide
  MOD_RES (6)..(7): Xaa is C or S
STPPTXXVPTRLSPINILYF

SEQ ID NO: 5420 - protein, 27 aa, Artificial Sequence
  Cyclic GFR-binding peptide
  MOD_RES (6)..(7): Xaa is C or S
RVPSTXXAPVKTSPINMLYFDNGRVLL

SEQ ID NO: 5421 - protein, 18 aa, Artificial Sequence
  Cyclic GFR-binding peptide
TKLSPINILYFDKGVVTY

SEQ ID NO: 5422 - protein, 17 aa, Artificial Sequence
  Cyclic GFR-binding peptide
ELSPINMLYFDEYDKVV

SEQ ID NO: 5423 - protein, 19 aa, Artificial Sequence
  Cyclic GFR-binding peptide
  MOD_RES (5)..(6): Xaa is C or S
VGKAXXVPTKLSPINVLYF

SEQ ID NO: 5424 - protein, 17 aa, Artificial Sequence
  Cyclic GFR-binding peptide
  MOD_RES (3)..(4): Xaa is C or S
ASXXVPARLSPINILYF

SEQ ID NO: 5425 - protein, 18 aa, Artificial Sequence
  Cyclic GFR-binding peptide
TQLSPINVLYFDDSSNVI

SEQ ID NO: 5426 - protein, 15 aa, Artificial Sequence
  Cyclic GFR-binding peptide
SPINILYFDAANNVV

SEQ ID NO: 5427 - protein, 18 aa, Artificial Sequence
  Cyclic GFR-binding peptide
TKLSPINVLYFDDSSNVI

SEQ ID NO: 5428 - protein, 17 aa, Artificial Sequence
  Cyclic GFR-binding peptide
KLSPINVLYFDSSNNVI

SEQ ID NO: 5429 - protein, 14 aa, Artificial Sequence
  Cyclic GFR-binding peptide
  MOD_RES (1)..(1): Xaa is C or S
XAPTKLSPINVLYF

SEQ ID NO: 5430 - protein, 18 aa, Artificial Sequence
  Cyclic GFR-binding peptide
TELSPINMLYFDEYDKVV

SEQ ID NO: 5431 - protein, 15 aa, Artificial Sequence
  Cyclic GFR-binding peptide
SPINILYFDSANNVV

SEQ ID NO: 5432 - protein, 16 aa, Artificial Sequence
  Cyclic GFR-binding peptide
LSPINILYFDKGVVTY

SEQ ID NO: 5433 - protein, 20 aa, Artificial Sequence
  Cyclic GFR-binding peptide
  MOD_RES (7)..(7): Xaa is C or S
HVTKPTXAPTKLSPINVLYF

SEQ ID NO: 5434 - protein, 20 aa, Artificial Sequence
  Cyclic GFR-binding peptide
  MOD_RES (6)..(7): Xaa is C or S
AVPKAXXAPTKLSPINVLYF

SEQ ID NO: 5435 - protein, 14 aa, Artificial Sequence
  Cyclic GFR-binding peptide
  MOD_RES (1)..(1): Xaa is C or S
XVPARLSPINILYF

SEQ ID NO: 5436 - protein, 19 aa, Artificial Sequence
  Cyclic GFR-binding peptide
  MOD_RES (5)..(6): Xaa is C or S
TPPTXXVPTRLSPINILYF

SEQ ID NO: 5437 - protein, 19 aa, Artificial Sequence
  Cyclic GFR-binding peptide
PTKLSPINVLYFDDMGVPT

SEQ ID NO: 5438 - protein, 27 aa, Artificial Sequence
  Cyclic GFR-binding peptide
  MOD_RES (6)..(7): Xaa is C or S
YVPKPXXAPTKLSPINVLYFDDSSNVI

SEQ ID NO: 5439 - protein, 19 aa, Artificial Sequence
  Cyclic GFR-binding peptide
  MOD_RES (5)..(6): Xaa is C or S
VPKPXXAPTKLSPINVLYF

SEQ ID NO: 5440 - protein, 19 aa, Artificial Sequence
  Cyclic GFR-binding peptide
  MOD_RES (5)..(6): Xaa is C or S
ASKAXXVPTKLSPINILYF

SEQ ID NO: 5441 - protein, 17 aa, Artificial Sequence
  Cyclic GFR-binding peptide
  MOD_RES (3)..(4): Xaa is C or S
KAXXVPTKLSPINVLYF

SEQ ID NO: 5442 - protein, 20 aa, Artificial Sequence
  Cyclic GFR-binding peptide
  MOD_RES (6)..(7): Xaa is C or S
RVPSTXXAPVKTSPINMLYF

SEQ ID NO: 5443 - protein, 16 aa, Artificial Sequence
  Cyclic GFR-binding peptide
IIQQKDNFYLMNIPSM

SEQ ID NO: 5444 - protein, 16 aa, Artificial Sequence
  Cyclic GFR-binding peptide
  MOD_RES (14)..(15): Xaa is C or S
FYLMNIPSLETPVXXA

SEQ ID NO: 5445 - protein, 13 aa, Artificial Sequence
  Cyclic GFR-binding peptide
FYLVNIPSLKTPA

SEQ ID NO: 5446 - protein, 14 aa, Artificial Sequence
  Cyclic GFR-binding peptide
  MOD_RES (14)..(14): Xaa is C or S
FYLINIPSLKTPVX

SEQ ID NO: 5447 - protein, 27 aa, Artificial Sequence
  Cyclic GFR-binding peptide
  MOD_RES (21)..(22): Xaa is C or S
IVNNSSDFYLVNIPSLKTPAXXAKPVA

SEQ ID NO: 5448 - protein, 16 aa, Artificial Sequence
  Cyclic GFR-binding peptide
  MOD_RES (14)..(15): Xaa is C or S
FYLINIPSLRAPVXXS

SEQ ID NO: 5449 - protein, 17 aa, Artificial Sequence
  Cyclic GFR-binding peptide
IVNSSDDFYLVNIPSLK

SEQ ID NO: 5450 - protein, 15 aa, Artificial Sequence
  Cyclic GFR-binding peptide
  MOD_RES (14)..(15): Xaa is C or S
FYLMNIPSTKVPAXX

SEQ ID NO: 5451 - protein, 14 aa, Artificial Sequence
  Cyclic GFR-binding peptide
  MOD_RES (14)..(14): Xaa is C or S
FYLVNIPSLQTPAX

SEQ ID NO: 5452 - protein, 27 aa, Artificial Sequence
  Cyclic GFR-binding peptide
  MOD_RES (21)..(22): Xaa is C or S
YTVVGKDFYLINIPSLKTPVXXAKSAK

SEQ ID NO: 5453 - protein, 27 aa, Artificial Sequence
  Cyclic GFR-binding peptide
  MOD_RES (21)..(22): Xaa is C or S
TPVGMDDFYLVNIPSLKTPVXXAKGVK

SEQ ID NO: 5454 - protein, 19 aa, Artificial Sequence
  Cyclic GFR-binding peptide
  MOD_RES (14)..(15): Xaa is C or S
FYLMNIPSLETPVXXAKPI

SEQ ID NO: 5455 - protein, 16 aa, Artificial Sequence
  Cyclic GFR-binding peptide
VVKENEDFYLMNIPSL

SEQ ID NO: 5456 - protein, 13 aa, Artificial Sequence
  Cyclic GFR-binding peptide
FYLINIPSLRTPV

SEQ ID NO: 5457 - protein, 19 aa, Artificial Sequence
  Cyclic GFR-binding peptide
IIQQKDNFYLMNIPSMKTP

SEQ ID NO: 5458 - protein, 27 aa, Artificial Sequence
  Cyclic GFR-binding peptide
  MOD_RES (21)..(22): Xaa is C or S
VVKDYEDFYLMNIPSLETPVXXAKPIS

SEQ ID NO: 5459 - protein, 20 aa, Artificial Sequence
  Cyclic GFR-binding peptide
  MOD_RES (14)..(15): Xaa is C or S
FYLINIPSLRAPVXXSAPAA

SEQ ID NO: 5460 - protein, 17 aa, Artificial Sequence
  Cyclic GFR-binding peptide
LLVRGNDFYLMNIPSTK

SEQ ID NO: 5461 - protein, 13 aa, Artificial Sequence
  Cyclic GFR-binding peptide
FYLVNIPSLKTPV

SEQ ID NO: 5462 - protein, 18 aa, Artificial Sequence
  Cyclic GFR-binding peptide
VVKENEDFYLMNIPSLET

SEQ ID NO: 5463 - protein, 17 aa, Artificial Sequence
  Cyclic GFR-binding peptide
  MOD_RES (14)..(15): Xaa is C or S
FYLVNIPSLKTPAXXAK

SEQ ID NO: 5464 - protein, 15 aa, Artificial Sequence
  Cyclic GFR-binding peptide
TPVGMDDFYLVNIPS

SEQ ID NO: 5465 - protein, 15 aa, Artificial Sequence
  Cyclic GFR-binding peptide
  MOD_RES (14)..(15): Xaa is C or S
FYLMNIPSLETPVXX

SEQ ID NO: 5466 - protein, 16 aa, Artificial Sequence
  Cyclic GFR-binding peptide
  MOD_RES (14)..(15): Xaa is C or S
FYLINIPSLRTPVXXT

SEQ ID NO: 5467 - protein, 17 aa, Artificial Sequence
  Cyclic GFR-binding peptide
VVNNASDFYLINIPSLR

SEQ ID NO: 5468 - protein, 27 aa, Artificial Sequence
  Cyclic GFR-binding peptide
  MOD_RES (21)..(22): Xaa is C or S
VVNNAADFYLINIPSLRAPVXXSAPAA

SEQ ID NO: 5469 - protein, 14 aa, Artificial Sequence
  Cyclic GFR-binding peptide
  MOD_RES (14)..(14): Xaa is C or S
FYLINIPSLRTPVX

SEQ ID NO: 5470 - protein, 17 aa, Artificial Sequence
  Cyclic GFR-binding peptide
  MOD_RES (14)..(14): Xaa is C or S
FYLVNIPSLKTPAXTPK

SEQ ID NO: 5471 - protein, 19 aa, Artificial Sequence
  Cyclic GFR-binding peptide
VVKENEDFYLMNIPSLETP

SEQ ID NO: 5472 - protein, 27 aa, Artificial Sequence
  Cyclic GFR-binding peptide
  MOD_RES (21)..(22): Xaa is C or S
VVNNASDFYLINIPSLRTPVXXTPPTS

SEQ ID NO: 5473 - protein, 20 aa, Artificial Sequence
  Cyclic GFR-binding peptide
  MOD_RES (14)..(15): Xaa is C or S
FYLINIPSLKTPVXXAKSAK

SEQ ID NO: 5474 - protein, 13 aa, Artificial Sequence
  Cyclic GFR-binding peptide
FYLINIPSLKTPV

SEQ ID NO: 5475 - protein, 19 aa, Artificial Sequence
  Cyclic GFR-binding peptide
  MOD_RES (14)..(14): Xaa is C or S
FYLVNIPSLKTPAXTPKTV

SEQ ID NO: 5476 - protein, 20 aa, Artificial Sequence
  Cyclic GFR-binding peptide
  MOD_RES (14)..(15): Xaa is C or S
FYLMNIPSLETPVXXAKPIS

SEQ ID NO: 5477 - protein, 17 aa, Artificial Sequence
  Cyclic GFR-binding peptide
  MOD_RES (14)..(15): Xaa is C or S
FYLINIPSLRTPVXXTP

SEQ ID NO: 5478 - protein, 13 aa, Artificial Sequence
  Cyclic GFR-binding peptide
FYLVNIPSLQTPA

SEQ ID NO: 5479 - protein, 16 aa, Artificial Sequence
  Cyclic GFR-binding peptide
  MOD_RES (14)..(15): Xaa is C or S
FYLMNIPSTKVPAXXT

SEQ ID NO: 5480 - protein, 27 aa, Artificial Sequence
  Cyclic GFR-binding peptide
  MOD_RES (21)..(22): Xaa is C or S
IIQQKDNFYLMNIPSMKTPTXXPGASG

SEQ ID NO: 5481 - protein, 20 aa, Artificial Sequence
  Cyclic GFR-binding peptide
  MOD_RES (14)..(15): Xaa is C or S
FYLVNIPSLQTPAXXPKPVT

SEQ ID NO: 5482 - protein, 15 aa, Artificial Sequence
  Cyclic GFR-binding peptide
VVKDYEDFYLMNIPS

SEQ ID NO: 5483 - protein, 20 aa, Artificial Sequence
  Cyclic GFR-binding peptide
  MOD_RES (14)..(15): Xaa is C or S
FYLVNIPSLKTPVXXAKGVK

SEQ ID NO: 5484 - protein, 16 aa, Artificial Sequence
  Cyclic GFR-binding peptide
TPVGMDDFYLVNIPSL

SEQ ID NO: 5485 - protein, 14 aa, Artificial Sequence
  Cyclic GFR-binding peptide
  MOD_RES (14)..(14): Xaa is C or S
FYLVNIPSLKTPVX

SEQ ID NO: 5486 - protein, 17 aa, Artificial Sequence
  Cyclic GFR-binding peptide
TPVGMDDFYLVNIPSLK

SEQ ID NO: 5487 - protein, 18 aa, Artificial Sequence
  Cyclic GFR-binding peptide
  MOD_RES (14)..(15): Xaa is C or S
FYLMNIPSLETPVXXAKP

SEQ ID NO: 5488 - protein, 16 aa, Artificial Sequence
  Cyclic GFR-binding peptide
VVNNAADFYLINIPSL

SEQ ID NO: 5489 - protein, 16 aa, Artificial Sequence
  Cyclic GFR-binding peptide
  MOD_RES (14)..(15): Xaa is C or S
FYLVNIPSLKTPAXXP

SEQ ID NO: 5490 - protein, 18 aa, Artificial Sequence
  Cyclic GFR-binding peptide
  MOD_RES (14)..(14): Xaa is C or S
FYLVNIPSLKTPAXTPKT

SEQ ID NO: 5491 - protein, 15 aa, Artificial Sequence
  Cyclic GFR-binding peptide
VVKENEDFYLMNIPS

SEQ ID NO: 5492 - protein, 20 aa, Artificial Sequence
  Cyclic GFR-binding peptide
  MOD_RES (14)..(15): Xaa is C or S
FYLMNIPSLETPVXXAKPIK

SEQ ID NO: 5493 - protein, 19 aa, Artificial Sequence
  Cyclic GFR-binding peptide
  MOD_RES (14)..(15): Xaa is C or S
FYLVNIPSLKTPAXXAKPV

SEQ ID NO: 5494 - protein, 15 aa, Artificial Sequence
  Cyclic GFR-binding peptide
  MOD_RES (14)..(15): Xaa is C or S
FYLINIPSLRAPVXX

SEQ ID NO: 5495 - protein, 13 aa, Artificial Sequence
  Cyclic GFR-binding peptide
FYLMNIPSTKVPA

SEQ ID NO: 5496 - protein, 19 aa, Artificial Sequence
  Cyclic GFR-binding peptide
YTVVGKDFYLINIPSLKTP

SEQ ID NO: 5497 - protein, 27 aa, Artificial Sequence
  Cyclic GFR-binding peptide
  MOD_RES (21)..(21): Xaa is C or S
IVNSSDDFYLVNIPSLKTPAXTPKTVH

SEQ ID NO: 5498 - protein, 17 aa, Artificial Sequence
  Cyclic GFR-binding peptide
  MOD_RES (14)..(15): Xaa is C or S
FYLVNIPSLQTPAXXPK

SEQ ID NO: 5499 - protein, 15 aa, Artificial Sequence
  Cyclic GFR-binding peptide
LLVRGNDFYLMNIPS

SEQ ID NO: 5500 - protein, 18 aa, Artificial Sequence
  Cyclic GFR-binding peptide
TPVGMDDFYLVNIPSLKT

SEQ ID NO: 5501 - protein, 27 aa, Artificial Sequence
  Cyclic GFR-binding peptide
  MOD_RES (21)..(22): Xaa is C or S
VVKENEDFYLMNIPSLETPVXXAKPIK

SEQ ID NO: 5502 - protein, 18 aa, Artificial Sequence
  Cyclic GFR-binding peptide
IIQQKDNFYLMNIPSMKT

SEQ ID NO: 5503 - protein, 16 aa, Artificial Sequence
  Cyclic GFR-binding peptide
LLVRGNDFYLMNIPST

SEQ ID NO: 5504 - protein, 19 aa, Artificial Sequence
  Cyclic GFR-binding peptide
IVNNSSDFYLVNIPSLKTP

SEQ ID NO: 5505 - protein, 19 aa, Artificial Sequence
  Cyclic GFR-binding peptide
IVNSSDDFYLVNIPSLKTP

SEQ ID NO: 5506 - protein, 14 aa, Artificial Sequence
  Cyclic GFR-binding peptide
  MOD_RES (14)..(14): Xaa is C or S
FYLMNIPSLETPVX

SEQ ID NO: 5507 - protein, 18 aa, Artificial Sequence
  Cyclic GFR-binding peptide
  MOD_RES (14)..(15): Xaa is C or S
FYLMNIPSTKVPAXXTSP

SEQ ID NO: 5508 - protein, 19 aa, Artificial Sequence
  Cyclic GFR-binding peptide
  MOD_RES (14)..(15): Xaa is C or S
FYLVNIPSLQTPAXXPKPV

SEQ ID NO: 5509 - protein, 16 aa, Artificial Sequence
  Cyclic GFR-binding peptide
VVNNASDFYLINIPSL

SEQ ID NO: 5510 - protein, 16 aa, Artificial Sequence
  Cyclic GFR-binding peptide
  MOD_RES (14)..(15): Xaa is C or S
FYLVNIPSLKTPVXXA

SEQ ID NO: 5511 - protein, 15 aa, Artificial Sequence
  Cyclic GFR-binding peptide
YTVVGKDFYLINIPS

SEQ ID NO: 5512 - protein, 17 aa, Artificial Sequence
  Cyclic GFR-binding peptide
IIQQKDNFYLMNIPSMK

SEQ ID NO: 5513 - protein, 18 aa, Artificial Sequence
  Cyclic GFR-binding peptide
  MOD_RES (14)..(15): Xaa is C or S
FYLINIPSLRTPVXXTPP

SEQ ID NO: 5514 - protein, 19 aa, Artificial Sequence
  Cyclic GFR-binding peptide
IVNSSDDFYLVNIPSLQTP

SEQ ID NO: 5515 - protein, 15 aa, Artificial Sequence
  Cyclic GFR-binding peptide
IIQQKDNFYLMNIPS

SEQ ID NO: 5516 - protein, 18 aa, Artificial Sequence
  Cyclic GFR-binding peptide
  MOD_RES (14)..(15): Xaa is C or S
FYLVNIPSLQTPAXXPKP

SEQ ID NO: 5517 - protein, 18 aa, Artificial Sequence
  Cyclic GFR-binding peptide
  MOD_RES (14)..(15): Xaa is C or S
FYLVNIPSLKTPAXXPKP

SEQ ID NO: 5518 - protein, 16 aa, Artificial Sequence
  Cyclic GFR-binding peptide
  MOD_RES (14)..(15): Xaa is C or S
FYLVNIPSLKTPAXXA

SEQ ID NO: 5519 - protein, 19 aa, Artificial Sequence
  Cyclic GFR-binding peptide
VVKDYEDFYLMNIPSLETP

SEQ ID NO: 5520 - protein, 19 aa, Artificial Sequence
  Cyclic GFR-binding peptide
VVNNASDFYLINIPSLRTP

SEQ ID NO: 5521 - protein, 18 aa, Artificial Sequence
  Cyclic GFR-binding peptide
  MOD_RES (14)..(15): Xaa is C or S
FYLINIPSLKTPVXXAKS

SEQ ID NO: 5522 - protein, 18 aa, Artificial Sequence
  Cyclic GFR-binding peptide
VVNNAADFYLINIPSLRA

SEQ ID NO: 5523 - protein, 13 aa, Artificial Sequence
  Cyclic GFR-binding peptide
FYLMNIPSLETPV

SEQ ID NO: 5524 - protein, 16 aa, Artificial Sequence
  Cyclic GFR-binding peptide
  MOD_RES (14)..(15): Xaa is C or S
FYLINIPSLKTPVXXA

SEQ ID NO: 5525 - protein, 13 aa, Artificial Sequence
  Cyclic GFR-binding peptide
FYLINIPSLRAPV

SEQ ID NO: 5526 - protein, 19 aa, Artificial Sequence
  Cyclic GFR-binding peptide
LLVRGNDFYLMNIPSTKVP

SEQ ID NO: 5527 - protein, 17 aa, Artificial Sequence
  Cyclic GFR-binding peptide
VVKENEDFYLMNIPSLE

SEQ ID NO: 5528 - protein, 16 aa, Artificial Sequence
  Cyclic GFR-binding peptide
IVNSSDDFYLVNIPSL

SEQ ID NO: 5529 - protein, 20 aa, Artificial Sequence
  Cyclic GFR-binding peptide
  MOD_RES (14)..(15): Xaa is C or S
FYLVNIPSLKTPAXXPKPVH

SEQ ID NO: 5530 - protein, 15 aa, Artificial Sequence
  Cyclic GFR-binding peptide
  MOD_RES (14)..(15): Xaa is C or S
FYLINIPSLRTPVXX

SEQ ID NO: 5531 - protein, 16 aa, Artificial Sequence
  Cyclic GFR-binding peptide
IVNNSSDFYLVNIPSL

SEQ ID NO: 5532 - protein, 15 aa, Artificial Sequence
  Cyclic GFR-binding peptide
IVNNSSDFYLVNIPS

SEQ ID NO: 5533 - protein, 16 aa, Artificial Sequence
  Cyclic GFR-binding peptide
  MOD_RES (14)..(14): Xaa is C or S
FYLVNIPSLKTPAXTP

SEQ ID NO: 5534 - protein, 15 aa, Artificial Sequence
  Cyclic GFR-binding peptide
  MOD_RES (14)..(15): Xaa is C or S
FYLVNIPSLKTPVXX

SEQ ID NO: 5535 - protein, 15 aa, Artificial Sequence
  Cyclic GFR-binding peptide
IVNSSDDFYLVNIPS

SEQ ID NO: 5536 - protein, 15 aa, Artificial Sequence
  Cyclic GFR-binding peptide
  MOD_RES (14)..(15): Xaa is C or S
FYLVNIPSLKTPAXX

SEQ ID NO: 5537 - protein, 17 aa, Artificial Sequence
  Cyclic GFR-binding peptide
VVNNAADFYLINIPSLR

SEQ ID NO: 5538 - protein, 17 aa, Artificial Sequence
  Cyclic GFR-binding peptide
  MOD_RES (14)..(15): Xaa is C or S
FYLMNIPSLETPVXXAK

SEQ ID NO: 5539 - protein, 15 aa, Artificial Sequence
  Cyclic GFR-binding peptide
  MOD_RES (14)..(15): Xaa is C or S
FYLINIPSLKTPVXX

SEQ ID NO: 5540 - skipped

SEQ ID NO: 5541 - protein, 18 aa, Artificial Sequence
  Cyclic GFR-binding peptide
  MOD_RES (14)..(15): Xaa is C or S
FYLVNIPSLKTPVXXAKG

SEQ ID NO: 5542 - protein, 19 aa, Artificial Sequence
  Cyclic GFR-binding peptide
  MOD_RES (14)..(15): Xaa is C or S
FYLMNIPSTKVPAXXTSPV

SEQ ID NO: 5543 - protein, 15 aa, Artificial Sequence
  Cyclic GFR-binding peptide
  MOD_RES (14)..(15): Xaa is C or S
FYLVNIPSLQTPAXX

SEQ ID NO: 5544 - protein, 18 aa, Artificial Sequence
  Cyclic GFR-binding peptide
VVNNASDFYLINIPSLRT

SEQ ID NO: 5545 - protein, 19 aa, Artificial Sequence
  Cyclic GFR-binding peptide
VVNNAADFYLINIPSLRAP

SEQ ID NO: 5546 - protein, 17 aa, Artificial Sequence
  Cyclic GFR-binding peptide
  MOD_RES (14)..(15): Xaa is C or S
FYLMNIPSTKVPAXXTS

SEQ ID NO: 5547 - protein, 15 aa, Artificial Sequence
  Cyclic GFR-binding peptide
  MOD_RES (14)..(14): Xaa is C or S
FYLVNIPSLKTPAXT

SEQ ID NO: 5548 - protein, 27 aa, Artificial Sequence
  Cyclic GFR-binding peptide
  MOD_RES (21)..(22): Xaa is C or S
IVNSSDDFYLVNIPSLKTPAXXPKPVH

SEQ ID NO: 5549 - protein, 16 aa, Artificial Sequence
  Cyclic GFR-binding peptide
  MOD_RES (14)..(15): Xaa is C or S
FYLVNIPSLQTPAXXP

SEQ ID NO: 5550 - protein, 18 aa, Artificial Sequence
  Cyclic GFR-binding peptide
IVNNSSDFYLVNIPSLKT

SEQ ID NO: 5551 - protein, 20 aa, Artificial Sequence
  Cyclic GFR-binding peptide
  MOD_RES (14)..(15): Xaa is C or S
FYLVNIPSLKTPAXXPKPVY

SEQ ID NO: 5552 - protein, 18 aa, Artificial Sequence
  Cyclic GFR-binding peptide
  MOD_RES (14)..(15): Xaa is C or S
FYLVNIPSLKTPAXXAKP

SEQ ID NO: 5553 - protein, 18 aa, Artificial Sequence
  Cyclic GFR-binding peptide
  MOD_RES (14)..(15): Xaa is C or S
FYLINIPSLRAPVXXSAP

SEQ ID NO: 5554 - protein, 19 aa, Artificial Sequence
  Cyclic GFR-binding peptide
  MOD_RES (14)..(15): Xaa is C or S
FYLINIPSLRAPVXXSAPA

SEQ ID NO: 5555 - protein, 14 aa, Artificial Sequence
  Cyclic GFR-binding peptide
  MOD_RES (14)..(14): Xaa is C or S
FYLMNIPSTKVPAX

SEQ ID NO: 5556 - protein, 17 aa, Artificial Sequence
  Cyclic GFR-binding peptide
  MOD_RES (14)..(15): Xaa is C or S
FYLINIPSLKTPVXXAK

SEQ ID NO: 5557 - protein, 16 aa, Artificial Sequence
  Cyclic GFR-binding peptide
VVKDYEDFYLMNIPSL

SEQ ID NO: 5558 - protein, 18 aa, Artificial Sequence
  Cyclic GFR-binding peptide
LLVRGNDFYLMNIPSTKV

SEQ ID NO: 5559 - protein, 17 aa, Artificial Sequence
  Cyclic GFR-binding peptide
IVNSSDDFYLVNIPSLQ

SEQ ID NO: 5560 - protein, 17 aa, Artificial Sequence
  Cyclic GFR-binding peptide
YTVVGKDFYLINIPSLK

SEQ ID NO: 5561 - protein, 17 aa, Artificial Sequence
  Cyclic GFR-binding peptide
  MOD_RES (14)..(15): Xaa is C or S
FYLVNIPSLKTPAXXPK

SEQ ID NO: 5562 - protein, 27 aa, Artificial Sequence
  Cyclic GFR-binding peptide
  MOD_RES (21)..(22): Xaa is C or S
IVNSSDDFYLVNIPSLQTPAXXPKPVT

SEQ ID NO: 5563 - protein, 20 aa, Artificial Sequence
  Cyclic GFR-binding peptide
  MOD_RES (14)..(15): Xaa is C or S
FYLINIPSLRTPVXXTPPTS

SEQ ID NO: 5564 - protein, 27 aa, Artificial Sequence
  Cyclic GFR-binding peptide
  MOD_RES (21)..(22): Xaa is C or S
LLVRGNDFYLMNIPSTKVPAXXTSPVR

SEQ ID NO: 5565 - protein, 18 aa, Artificial Sequence
  Cyclic GFR-binding peptide
YTVVGKDFYLINIPSLKT

SEQ ID NO: 5566 - protein, 17 aa, Artificial Sequence
  Cyclic GFR-binding peptide
VVKDYEDFYLMNIPSLE

SEQ ID NO: 5567 - protein, 19 aa, Artificial Sequence
  Cyclic GFR-binding peptide
  MOD_RES (14)..(15): Xaa is C or S
FYLVNIPSLKTPVXXAKGV

SEQ ID NO: 5568 - protein, 17 aa, Artificial Sequence
  Cyclic GFR-binding peptide
  MOD_RES (14)..(15): Xaa is C or S
FYLINIPSLRAPVXXSA

SEQ ID NO: 5569 - protein, 18 aa, Artificial Sequence
  Cyclic GFR-binding peptide
IVNSSDDFYLVNIPSLQT

SEQ ID NO: 5570 - protein, 15 aa, Artificial Sequence
  Cyclic GFR-binding peptide
VVNNAADFYLINIPS

SEQ ID NO: 5571 - protein, 18 aa, Artificial Sequence
  Cyclic GFR-binding peptide
IVNSSDDFYLVNIPSLKT

SEQ ID NO: 5572 - protein, 17 aa, Artificial Sequence
  Cyclic GFR-binding peptide
IVNNSSDFYLVNIPSLK

SEQ ID NO: 5573 - protein, 14 aa, Artificial Sequence
  Cyclic GFR-binding peptide
  MOD_RES (14)..(14): Xaa is C or S
FYLVNIPSLKTPAX

SEQ ID NO: 5574 - protein, 18 aa, Artificial Sequence
  Cyclic GFR-binding peptide
VVKDYEDFYLMNIPSLET

SEQ ID NO: 5575 - protein, 15 aa, Artificial Sequence
  Cyclic GFR-binding peptide
VVNNASDFYLINIPS

SEQ ID NO: 5576 - protein, 16 aa, Artificial Sequence
  Cyclic GFR-binding peptide
YTVVGKDFYLINIPSL

SEQ ID NO: 5577 - protein, 20 aa, Artificial Sequence
  Cyclic GFR-binding peptide
  MOD_RES (14)..(14): Xaa is C or S
FYLVNIPSLKTPAXTPKTVH

SEQ ID NO: 5578 - protein, 20 aa, Artificial Sequence
  Cyclic GFR-binding peptide
  MOD_RES (14)..(15): Xaa is C or S
FYLVNIPSLKTPAXXAKPVA

SEQ ID NO: 5579 - protein, 14 aa, Artificial Sequence
  Cyclic GFR-binding peptide
  MOD_RES (14)..(14): Xaa is C or S
FYLINIPSLRAPVX

SEQ ID NO: 5580 - protein, 19 aa, Artificial Sequence
  Cyclic GFR-binding peptide
  MOD_RES (14)..(15): Xaa is C or S
FYLINIPSLRTPVXXTPPT

SEQ ID NO: 5581 - protein, 19 aa, Artificial Sequence
  Cyclic GFR-binding peptide
TPVGMDDFYLVNIPSLKTP

SEQ ID NO: 5582 - protein, 27 aa, Artificial Sequence
  Cyclic GFR-binding peptide
  MOD_RES (21)..(22): Xaa is C or S
IVNSSDDFYLVNIPSLKTPAXXPKPVY

SEQ ID NO: 5583 - protein, 19 aa, Artificial Sequence
  Cyclic GFR-binding peptide
  MOD_RES (14)..(15): Xaa is C or S
FYLVNIPSLKTPAXXPKPV

SEQ ID NO: 5584 - protein, 19 aa, Artificial Sequence
  Cyclic GFR-binding peptide
  MOD_RES (14)..(15): Xaa is C or S
FYLINIPSLKTPVXXAKSA

SEQ ID NO: 5585 - protein, 17 aa, Artificial Sequence
  Cyclic GFR-binding peptide
  MOD_RES (14)..(15): Xaa is C or S
FYLVNIPSLKTPVXXAK

SEQ ID NO: 5586 - protein, 20 aa, Artificial Sequence
  Cyclic GFR-binding peptide
  MOD_RES (14)..(15): Xaa is C or S
FYLMNIPSTKVPAXXTSPVR

SEQ ID NO: 5587 - protein, 16 aa, Artificial Sequence
  Cyclic GFR-binding peptide
  MOD_RES (2)..(3): Xaa is C or S
AXXVPTELSPINMLYF

SEQ ID NO: 5588 - protein, 13 aa, Artificial Sequence
  Cyclic GFR-binding peptide
APTKLSPINVLYF

SEQ ID NO: 5589 - protein, 14 aa, Artificial Sequence
  Cyclic GFR-binding peptide
  MOD_RES (1)..(1): Xaa is C or S
XVPTKLSPINILYF

SEQ ID NO: 5590 - protein, 27 aa, Artificial Sequence
  Cyclic GFR-binding peptide
  MOD_RES (6)..(7): Xaa is C or S
AVPKAXXAPTKLSPINVLYFDSSNNVI

SEQ ID NO: 5591 - protein, 16 aa, Artificial Sequence
  Cyclic GFR-binding peptide
  MOD_RES (2)..(3): Xaa is C or S
SXXVPARLSPINILYF

SEQ ID NO: 5592 - protein, 17 aa, Artificial Sequence
  Cyclic GFR-binding peptide
KLSPINVLYFDDSSNVI

SEQ ID NO: 5593 - protein, 15 aa, Artificial Sequence
  Cyclic GFR-binding peptide
  MOD_RES (1)..(2): Xaa is C or S
XXAPVKTSPINMLYF

SEQ ID NO: 5594 - protein, 14 aa, Artificial Sequence
  Cyclic GFR-binding peptide
  MOD_RES (1)..(1): Xaa is C or S
XAPTQLSPINVLYF

SEQ ID NO: 5595 - protein, 27 aa, Artificial Sequence
  Cyclic GFR-binding peptide
  MOD_RES (6)..(7): Xaa is C or S
KASKAXXVPTKLSPINILYFDKGVVTY

SEQ ID NO: 5596 - protein, 27 aa, Artificial Sequence
  Cyclic GFR-binding peptide
  MOD_RES (6)..(7): Xaa is C or S
KVGKAXXVPTKLSPINVLYFDDMGVPT

SEQ ID NO: 5597 - protein, 19 aa, Artificial Sequence
  Cyclic GFR-binding peptide
  MOD_RES (5)..(6): Xaa is C or S
IPKAXXVPTELSPINMLYF

SEQ ID NO: 5598 - protein, 16 aa, Artificial Sequence
  Cyclic GFR-binding peptide
LSPINMLYFDENEKVV

SEQ ID NO: 5599 - protein, 13 aa, Artificial Sequence
  Cyclic GFR-binding peptide
VPTRLSPINILYF

SEQ ID NO: 5600 - protein, 27 aa, Artificial Sequence
  Cyclic GFR-binding peptide
  MOD_RES (6)..(7): Xaa is C or S
SIPKAXXVPTELSPINMLYFDEYDKVV

SEQ ID NO: 5601 - protein, 20 aa, Artificial Sequence
  Cyclic GFR-binding peptide
  MOD_RES (6)..(7): Xaa is C or S
AAPASXXVPARLSPINILYF

SEQ ID NO: 5602 - protein, 17 aa, Artificial Sequence
  Cyclic GFR-binding peptide
KTSPINMLYFDNGRVLL

SEQ ID NO: 5603 - protein, 13 aa, Artificial Sequence
  Cyclic GFR-binding peptide
VPTKLSPINVLYF

SEQ ID NO: 5604 - protein, 18 aa, Artificial Sequence
  Cyclic GFR-binding peptide
TELSPINMLYFDENEKVV

SEQ ID NO: 5605 - protein, 17 aa, Artificial Sequence
  Cyclic GFR-binding peptide
  MOD_RES (3)..(4): Xaa is C or S
KAXXAPTKLSPINVLYF

SEQ ID NO: 5606 - protein, 15 aa, Artificial Sequence
  Cyclic GFR-binding peptide
SPINVLYFDDMGVPT

SEQ ID NO: 5607 - protein, 15 aa, Artificial Sequence
  Cyclic GFR-binding peptide
  MOD_RES (1)..(2): Xaa is C or S
XXVPTELSPINMLYF

SEQ ID NO: 5608 - protein, 16 aa, Artificial Sequence
  Cyclic GFR-binding peptide
  MOD_RES (2)..(3): Xaa is C or S
TXXVPTRLSPINILYF

SEQ ID NO: 5609 - protein, 17 aa, Artificial Sequence
  Cyclic GFR-binding peptide
RLSPINILYFDSANNVV

SEQ ID NO: 5610 - protein, 27 aa, Artificial Sequence
  Cyclic GFR-binding peptide
  MOD_RES (6)..(7): Xaa is C or S
AAPASXXVPARLSPINILYFDAANNVV

SEQ ID NO: 5611 - protein, 14 aa, Artificial Sequence
  Cyclic GFR-binding peptide
  MOD_RES (1)..(1): Xaa is C or S
XVPTRLSPINILYF

SEQ ID NO: 5612 - protein, 17 aa, Artificial Sequence
  Cyclic GFR-binding peptide
  MOD_RES (4)..(4): Xaa is C or S
KPTXAPTKLSPINVLYF

SEQ ID NO: 5613 - protein, 19 aa, Artificial Sequence
  Cyclic GFR-binding peptide
PTELSPINMLYFDENEKVV

SEQ ID NO: 5614 - protein, 27 aa, Artificial Sequence
  Cyclic GFR-binding peptide
  MOD_RES (6)..(7): Xaa is C or S
STPPTXXVPTRLSPINILYFDSANNVV

SEQ ID NO: 5615 - protein, 20 aa, Artificial Sequence
  Cyclic GFR-binding peptide
  MOD_RES (6)..(7): Xaa is C or S
KASKAXXVPTKLSPINILYF

SEQ ID NO: 5616 - protein, 13 aa, Artificial Sequence
  Cyclic GFR-binding peptide
VPTKLSPINILYF

SEQ ID NO: 5617 - protein, 19 aa, Artificial Sequence
  Cyclic GFR-binding peptide
  MOD_RES (6)..(6): Xaa is C or S
VTKPTXAPTKLSPINVLYF

SEQ ID NO: 5618 - protein, 20 aa, Artificial Sequence
  Cyclic GFR-binding peptide
  MOD_RES (6)..(7): Xaa is C or S
SIPKAXXVPTELSPINMLYF

SEQ ID NO: 5619 - protein, 17 aa, Artificial Sequence
  Cyclic GFR-binding peptide
  MOD_RES (3)..(4): Xaa is C or S
PTXXVPTRLSPINILYF

SEQ ID NO: 5620 - protein, 13 aa, Artificial Sequence
  Cyclic GFR-binding peptide
APTQLSPINVLYF

SEQ ID NO: 5621 - protein, 16 aa, Artificial Sequence
  Cyclic GFR-binding peptide
  MOD_RES (2)..(3): Xaa is C or S
TXXAPVKTSPINMLYF

SEQ ID NO: 5622 - protein, 20 aa, Artificial Sequence
  Cyclic GFR-binding peptide
  MOD_RES (6)..(7): Xaa is C or S
TVPKPXXAPTQLSPINVLYF

SEQ ID NO: 5623 - protein, 15 aa, Artificial Sequence
  Cyclic GFR-binding peptide
SPINMLYFDEYDKVV

SEQ ID NO: 5624 - protein, 20 aa, Artificial Sequence
  Cyclic GFR-binding peptide
  MOD_RES (6)..(7): Xaa is C or S
KVGKAXXVPTKLSPINVLYF

SEQ ID NO: 5625 - protein, 16 aa, Artificial Sequence
  Cyclic GFR-binding peptide
LSPINVLYFDDMGVPT

SEQ ID NO: 5626 - protein, 14 aa, Artificial Sequence
  Cyclic GFR-binding peptide
  MOD_RES (1)..(1): Xaa is C or S
XVPTKLSPINVLYF

SEQ ID NO: 5627 - protein, 17 aa, Artificial Sequence
  Cyclic GFR-binding peptide
KLSPINVLYFDDMGVPT

SEQ ID NO: 5628 - protein, 18 aa, Artificial Sequence
  Cyclic GFR-binding peptide
  MOD_RES (4)..(5): Xaa is C or S
PKAXXVPTELSPINMLYF

SEQ ID NO: 5629 - protein, 16 aa, Artificial Sequence
  Cyclic GFR-binding peptide
LSPINILYFDAANNVV

SEQ ID NO: 5630 - protein, 16 aa, Artificial Sequence
  Cyclic GFR-binding peptide
  MOD_RES (2)..(3): Xaa is C or S
PXXAPTKLSPINVLYF

SEQ ID NO: 5631 - protein, 18 aa, Artificial Sequence
  Cyclic GFR-binding peptide
  MOD_RES (5)..(5): Xaa is C or S
TKPTXAPTKLSPINVLYF

SEQ ID NO: 5632 - protein, 15 aa, Artificial Sequence
  Cyclic GFR-binding peptide
SPINMLYFDENEKVV

SEQ ID NO: 5633 - protein, 20 aa, Artificial Sequence
  Cyclic GFR-binding peptide
  MOD_RES (6)..(7): Xaa is C or S
KIPKAXXVPTELSPINMLYF

SEQ ID NO: 5634 - protein, 19 aa, Artificial Sequence
  Cyclic GFR-binding peptide
  MOD_RES (5)..(6): Xaa is C or S
VPKAXXAPTKLSPINVLYF

SEQ ID NO: 5635 - protein, 15 aa, Artificial Sequence
  Cyclic GFR-binding peptide
  MOD_RES (1)..(2): Xaa is C or S
XXVPARLSPINILYF

SEQ ID NO: 5636 - protein, 13 aa, Artificial Sequence
  Cyclic GFR-binding peptide
APVKTSPINMLYF

SEQ ID NO: 5637 - protein, 19 aa, Artificial Sequence
  Cyclic GFR-binding peptide
PTKLSPINILYFDKGVVTY

SEQ ID NO: 5638 - protein, 27 aa, Artificial Sequence
  Cyclic GFR-binding peptide
  MOD_RES (7)..(7): Xaa is C or S
HVTKPTXAPTKLSPINVLYFDDSSNVI

SEQ ID NO: 5639 - protein, 17 aa, Artificial Sequence
  Cyclic GFR-binding peptide
  MOD_RES (3)..(4): Xaa is C or S
KPXXAPTQLSPINVLYF

SEQ ID NO: 5640 - protein, 15 aa, Artificial Sequence
  Cyclic GFR-binding peptide
SPINMLYFDNGRVLL

SEQ ID NO: 5641 - protein, 18 aa, Artificial Sequence
  Cyclic GFR-binding peptide
TKLSPINVLYFDDMGVPT

SEQ ID NO: 5642 - protein, 27 aa, Artificial Sequence
  Cyclic GFR-binding peptide
  MOD_RES (6)..(7): Xaa is C or S
KIPKAXXVPTELSPINMLYFDENEKVV

SEQ ID NO: 5643 - protein, 16 aa, Artificial Sequence
  Cyclic GFR-binding peptide
TSPINMLYFDNGRVLL

SEQ ID NO: 5644 - protein, 19 aa, Artificial Sequence
  Cyclic GFR-binding peptide
PTKLSPINVLYFDSSNNVI

SEQ ID NO: 5645 - protein, 19 aa, Artificial Sequence
  Cyclic GFR-binding peptide
PTKLSPINVLYFDDSSNVI

SEQ ID NO: 5646 - protein, 14 aa, Artificial Sequence
  Cyclic GFR-binding peptide
  MOD_RES (1)..(1): Xaa is C or S
XVPTELSPINMLYF

SEQ ID NO: 5647 - protein, 18 aa, Artificial Sequence
  Cyclic GFR-binding peptide
  MOD_RES (4)..(5): Xaa is C or S
PSTXXAPVKTSPINMLYF

SEQ ID NO: 5648 - protein, 19 aa, Artificial Sequence
  Cyclic GFR-binding peptide
  MOD_RES (5)..(6): Xaa is C or S
VPKPXXAPTQLSPINVLYF

SEQ ID NO: 5649 - protein, 16 aa, Artificial Sequence
  Cyclic GFR-binding peptide
LSPINILYFDSANNVV

SEQ ID NO: 5650 - protein, 16 aa, Artificial Sequence
  Cyclic GFR-binding peptide
  MOD_RES (2)..(3): Xaa is C or S
AXXVPTKLSPINVLYF

SEQ ID NO: 5651 - protein, 15 aa, Artificial Sequence
  Cyclic GFR-binding peptide
SPINILYFDKGVVTY

SEQ ID NO: 5652 - protein, 18 aa, Artificial Sequence
  Cyclic GFR-binding peptide
  MOD_RES (4)..(5): Xaa is C or S
PPTXXVPTRLSPINILYF

SEQ ID NO: 5653 - protein, 19 aa, Artificial Sequence
  Cyclic GFR-binding peptide
PTQLSPINVLYFDDSSNVI

SEQ ID NO: 5654 - protein, 18 aa, Artificial Sequence
  Cyclic GFR-binding peptide
  MOD_RES (4)..(5): Xaa is C or S
PKPXXAPTQLSPINVLYF

SEQ ID NO: 5655 - protein, 18 aa, Artificial Sequence
  Cyclic GFR-binding peptide
  MOD_RES (4)..(5): Xaa is C or S
PKPXXAPTKLSPINVLYF

SEQ ID NO: 5656 - protein, 16 aa, Artificial Sequence
  Cyclic GFR-binding peptide
  MOD_RES (2)..(3): Xaa is C or S
AXXAPTKLSPINVLYF

SEQ ID NO: 5657 - protein, 19 aa, Artificial Sequence
  Cyclic GFR-binding peptide
PTELSPINMLYFDEYDKVV

SEQ ID NO: 5658 - protein, 19 aa, Artificial Sequence
  Cyclic GFR-binding peptide
PTRLSPINILYFDSANNVV

SEQ ID NO: 5659 - protein, 18 aa, Artificial Sequence
  Cyclic GFR-binding peptide
  MOD_RES (4)..(5): Xaa is C or S
SKAXXVPTKLSPINILYF

SEQ ID NO: 5660 - protein, 18 aa, Artificial Sequence
  Cyclic GFR-binding peptide
ARLSPINILYFDAANNVV

SEQ ID NO: 5661 - protein, 13 aa, Artificial Sequence
  Cyclic GFR-binding peptide
VPTELSPINMLYF

SEQ ID NO: 5662 - protein, 16 aa, Artificial Sequence
  Cyclic GFR-binding peptide
  MOD_RES (2)..(3): Xaa is C or S
AXXVPTKLSPINILYF

SEQ ID NO: 5663 - protein, 13 aa, Artificial Sequence
  Cyclic GFR-binding peptide
VPARLSPINILYF

SEQ ID NO: 5664 - protein, 19 aa, Artificial Sequence
  Cyclic GFR-binding peptide
PVKTSPINMLYFDNGRVLL

SEQ ID NO: 5665 - protein, 17 aa, Artificial Sequence
  Cyclic GFR-binding peptide
ELSPINMLYFDENEKVV

SEQ ID NO: 5666 - protein, 16 aa, Artificial Sequence
  Cyclic GFR-binding peptide
LSPINVLYFDDSSNVI

SEQ ID NO: 5667 - protein, 20 aa, Artificial Sequence
  Cyclic GFR-binding peptide
  MOD_RES (6)..(7): Xaa is C or S
HVPKPXXAPTKLSPINVLYF

SEQ ID NO: 5668 - protein, 15 aa, Artificial Sequence
  Cyclic GFR-binding peptide
  MOD_RES (1)..(2): Xaa is C or S
XXVPTRLSPINILYF

SEQ ID NO: 5669 - protein, 16 aa, Artificial Sequence
  Cyclic GFR-binding peptide
LSPINVLYFDSSNNVI

SEQ ID NO: 5670 - protein, 15 aa, Artificial Sequence
  Cyclic GFR-binding peptide
SPINVLYFDSSNNVI

SEQ ID NO: 5671 - protein, 16 aa, Artificial Sequence
  Cyclic GFR-binding peptide
  MOD_RES (3)..(3): Xaa is C or S
PTXAPTKLSPINVLYF

SEQ ID NO: 5672 - protein, 15 aa, Artificial Sequence
  Cyclic GFR-binding peptide
  MOD_RES (1)..(2): Xaa is C or S
XXVPTKLSPINVLYF

SEQ ID NO: 5673 - protein, 15 aa, Artificial Sequence
  Cyclic GFR-binding peptide
SPINVLYFDDSSNVI

SEQ ID NO: 5674 - protein, 15 aa, Artificial Sequence
  Cyclic GFR-binding peptide
  MOD_RES (1)..(2): Xaa is C or S
XXAPTKLSPINVLYF

SEQ ID NO: 5675 - protein, 17 aa, Artificial Sequence
  Cyclic GFR-binding peptide
RLSPINILYFDAANNVV

SEQ ID NO: 5676 - protein, 17 aa, Artificial Sequence
  Cyclic GFR-binding peptide
  MOD_RES (3)..(4): Xaa is C or S
KAXXVPTELSPINMLYF

SEQ ID NO: 5677 - protein, 15 aa, Artificial Sequence
  Cyclic GFR-binding peptide
  MOD_RES (1)..(2): Xaa is C or S
XXVPTKLSPINILYF

SEQ ID NO: 5678 - skipped

SEQ ID NO: 5679 - protein, 18 aa, Artificial Sequence
  Cyclic GFR-binding peptide
  MOD_RES (4)..(5): Xaa is C or S
GKAXXVPTKLSPINVLYF

SEQ ID NO: 5680 - protein, 19 aa, Artificial Sequence
  Cyclic GFR-binding peptide
  MOD_RES (5)..(6): Xaa is C or S
VPSTXXAPVKTSPINMLYF

SEQ ID NO: 5681 - protein, 15 aa, Artificial Sequence
  Cyclic GFR-binding peptide
  MOD_RES (1)..(2): Xaa is C or S
XXAPTQLSPINVLYF

SEQ ID NO: 5682 - protein, 18 aa, Artificial Sequence
  Cyclic GFR-binding peptide
TRLSPINILYFDSANNVV

SEQ ID NO: 5683 - protein, 19 aa, Artificial Sequence
  Cyclic GFR-binding peptide
PARLSPINILYFDAANNVV

SEQ ID NO: 5684 - protein, 17 aa, Artificial Sequence
  Cyclic GFR-binding peptide
  MOD_RES (3)..(4): Xaa is C or S
STXXAPVKTSPINMLYF

SEQ ID NO: 5685 - protein, 15 aa, Artificial Sequence
  Cyclic GFR-binding peptide
  MOD_RES (2)..(2): Xaa is C or S
TXAPTKLSPINVLYF

SEQ ID NO: 5686 - protein, 27 aa, Artificial Sequence
  Cyclic GFR-binding peptide
  MOD_RES (6)..(7): Xaa is C or S
HVPKPXXAPTKLSPINVLYFDDSSNVI

SEQ ID NO: 5687 - protein, 16 aa, Artificial Sequence
  Cyclic GFR-binding peptide
  MOD_RES (2)..(3): Xaa is C or S
PXXAPTQLSPINVLYF

SEQ ID NO: 5688 - protein, 18 aa, Artificial Sequence
  Cyclic GFR-binding peptide
TKLSPINVLYFDSSNNVI

SEQ ID NO: 5689 - protein, 20 aa, Artificial Sequence
  Cyclic GFR-binding peptide
  MOD_RES (6)..(7): Xaa is C or S
YVPKPXXAPTKLSPINVLYF

SEQ ID NO: 5690 - protein, 18 aa, Artificial Sequence
  Cyclic GFR-binding peptide
  MOD_RES (4)..(5): Xaa is C or S
PKAXXAPTKLSPINVLYF

SEQ ID NO: 5691 - protein, 18 aa, Artificial Sequence
  Cyclic GFR-binding peptide
  MOD_RES (4)..(5): Xaa is C or S
PASXXVPARLSPINILYF

SEQ ID NO: 5692 - protein, 19 aa, Artificial Sequence
  Cyclic GFR-binding peptide
  MOD_RES (5)..(6): Xaa is C or S
APASXXVPARLSPINILYF

SEQ ID NO: 5693 - protein, 14 aa, Artificial Sequence
  Cyclic GFR-binding peptide
  MOD_RES (1)..(1): Xaa is C or S
XAPVKTSPINMLYF

SEQ ID NO: 5694 - protein, 17 aa, Artificial Sequence
  Cyclic GFR-binding peptide
  MOD_RES (3)..(4): Xaa is C or S
KAXXVPTKLSPINILYF

SEQ ID NO: 5695 - protein, 16 aa, Artificial Sequence
  Cyclic GFR-binding peptide
LSPINMLYFDEYDKVV

SEQ ID NO: 5696 - protein, 18 aa, Artificial Sequence
  Cyclic GFR-binding peptide
VKTSPINMLYFDNGRVLL

SEQ ID NO: 5697 - protein, 17 aa, Artificial Sequence
  Cyclic GFR-binding peptide
QLSPINVLYFDDSSNVI

SEQ ID NO: 5698 - protein, 17 aa, Artificial Sequence
  Cyclic GFR-binding peptide
KLSPINILYFDKGVVTY

SEQ ID NO: 5699 - protein, 17 aa, Artificial Sequence
  Cyclic GFR-binding peptide
  MOD_RES (3)..(4): Xaa is C or S
KPXXAPTKLSPINVLYF

SEQ ID NO: 5700 - protein, 27 aa, Artificial Sequence
  Cyclic GFR-binding peptide
  MOD_RES (6)..(7): Xaa is C or S
TVPKPXXAPTQLSPINVLYFDDSSNVI

SEQ ID NO: 5701 - protein, 20 aa, Artificial Sequence
  Cyclic GFR-binding peptide
  MOD_RES (6)..(7): Xaa is C or S
STPPTXXVPTRLSPINILYF

SEQ ID NO: 5702 - protein, 27 aa, Artificial Sequence
  Cyclic GFR-binding peptide
  MOD_RES (6)..(7): Xaa is C or S
RVPSTXXAPVKTSPINMLYFDNGRVLL

SEQ ID NO: 5703 - protein, 18 aa, Artificial Sequence
  Cyclic GFR-binding peptide
TKLSPINILYFDKGVVTY

SEQ ID NO: 5704 - protein, 17 aa, Artificial Sequence
  Cyclic GFR-binding peptide
ELSPINMLYFDEYDKVV

SEQ ID NO: 5705 - protein, 19 aa, Artificial Sequence
  Cyclic GFR-binding peptide
  MOD_RES (5)..(6): Xaa is C or S
VGKAXXVPTKLSPINVLYF

SEQ ID NO: 5706 - protein, 17 aa, Artificial Sequence
  Cyclic GFR-binding peptide
  MOD_RES (3)..(4): Xaa is C or S
ASXXVPARLSPINILYF

SEQ ID NO: 5707 - protein, 18 aa, Artificial Sequence
  Cyclic GFR-binding peptide
TQLSPINVLYFDDSSNVI

SEQ ID NO: 5708 - protein, 15 aa, Artificial Sequence
  Cyclic GFR-binding peptide
SPINILYFDAANNVV

SEQ ID NO: 5709 - protein, 18 aa, Artificial Sequence
  Cyclic GFR-binding peptide
TKLSPINVLYFDDSSNVI

SEQ ID NO: 5710 - protein, 17 aa, Artificial Sequence
  Cyclic GFR-binding peptide
KLSPINVLYFDSSNNVI

SEQ ID NO: 5711 - protein, 14 aa, Artificial Sequence
  Cyclic GFR-binding peptide
  MOD_RES (1)..(1): Xaa is C or S
XAPTKLSPINVLYF

SEQ ID NO: 5712 - protein, 18 aa, Artificial Sequence
  Cyclic GFR-binding peptide
TELSPINMLYFDEYDKVV

SEQ ID NO: 5713 - protein, 15 aa, Artificial Sequence
  Cyclic GFR-binding peptide
SPINILYFDSANNVV

SEQ ID NO: 5714 - protein, 16 aa, Artificial Sequence
  Cyclic GFR-binding peptide
LSPINILYFDKGVVTY

SEQ ID NO: 5715 - protein, 20 aa, Artificial Sequence
  Cyclic GFR-binding peptide
  MOD_RES (7)..(7): Xaa is C or S
HVTKPTXAPTKLSPINVLYF

SEQ ID NO: 5716 - protein, 20 aa, Artificial Sequence
  Cyclic GFR-binding peptide
  MOD_RES (6)..(7): Xaa is C or S
AVPKAXXAPTKLSPINVLYF

SEQ ID NO: 5717 - protein, 14 aa, Artificial Sequence
  Cyclic GFR-binding peptide
  MOD_RES (1)..(1): Xaa is C or S
XVPARLSPINILYF

SEQ ID NO: 5718 - protein, 19 aa, Artificial Sequence
  Cyclic GFR-binding peptide
  MOD_RES (5)..(6): Xaa is C or S
TPPTXXVPTRLSPINILYF

SEQ ID NO: 5719 - protein, 19 aa, Artificial Sequence
  Cyclic GFR-binding peptide
PTKLSPINVLYFDDMGVPT

SEQ ID NO: 5720 - protein, 27 aa, Artificial Sequence
  Cyclic GFR-binding peptide
  MOD_RES (6)..(7): Xaa is C or S
YVPKPXXAPTKLSPINVLYFDDSSNVI

SEQ ID NO: 5721 - protein, 19 aa, Artificial Sequence
  Cyclic GFR-binding peptide
  MOD_RES (5)..(6): Xaa is C or S
VPKPXXAPTKLSPINVLYF

SEQ ID NO: 5722 - protein, 19 aa, Artificial Sequence
  Cyclic GFR-binding peptide
  MOD_RES (5)..(6): Xaa is C or S
ASKAXXVPTKLSPINILYF

SEQ ID NO: 5723 - protein, 17 aa, Artificial Sequence
  Cyclic GFR-binding peptide
  MOD_RES (3)..(4): Xaa is C or S
KAXXVPTKLSPINVLYF

SEQ ID NO: 5724 - protein, 20 aa, Artificial Sequence
  Cyclic GFR-binding peptide
  MOD_RES (6)..(7): Xaa is C or S
RVPSTXXAPVKTSPINMLYF

SEQ ID NO: 5725 - protein, 13 aa, Artificial Sequence
  Cyclic GFR-binding peptide
FYLVSIANLKTPA

SEQ ID NO: 5726 - protein, 15 aa, Artificial Sequence
  Cyclic GFR-binding peptide
IKPTKGIFYLISIAN

SEQ ID NO: 5727 - protein, 18 aa, Artificial Sequence
  Cyclic GFR-binding peptide
  MOD_RES (14)..(15): Xaa is C or S
FYLISIANLRTPVXXTPP

SEQ ID NO: 5728 - protein, 27 aa, Artificial Sequence
  Cyclic GFR-binding peptide
  MOD_RES (21)..(22): Xaa is C or S
VVNNASDFYLISIANLRTPVXXTPPTS

SEQ ID NO: 5729 - protein, 19 aa, Artificial Sequence
  Cyclic GFR-binding peptide
VVKENEDFYLMSIANLETP

SEQ ID NO: 5730 - protein, 27 aa, Artificial Sequence
  Cyclic GFR-binding peptide
  MOD_RES (21)..(22): Xaa is C or S
VVKENEDFYLMSIANLETPVXXAKPIK

SEQ ID NO: 5731 - protein, 14 aa, Artificial Sequence
  Cyclic GFR-binding peptide
  MOD_RES (14)..(14): Xaa is C or S
FYLISIANLAQPVX

SEQ ID NO: 5732 - protein, 27 aa, Artificial Sequence
  Cyclic GFR-binding peptide
  MOD_RES (21)..(22): Xaa is C or S
VKPTRGVFYLISIANLDQPVXXPSASA

SEQ ID NO: 5733 - protein, 18 aa, Artificial Sequence
  Cyclic GFR-binding peptide
VVKENEDFYLMSIANLET

SEQ ID NO: 5734 - protein, 17 aa, Artificial Sequence
  Cyclic GFR-binding peptide
IKPTKGIFYLISIANLD

SEQ ID NO: 5735 - protein, 19 aa, Artificial Sequence
  Cyclic GFR-binding peptide
  MOD_RES (14)..(15): Xaa is C or S
FYLISIANLDQSVXXPSAS

SEQ ID NO: 5736 - protein, 19 aa, Artificial Sequence
  Cyclic GFR-binding peptide
IKPTKGIFYLISIANLDQS

SEQ ID NO: 5737 - protein, 18 aa, Artificial Sequence
  Cyclic GFR-binding peptide
VKPKRGVFYLISIANLAQ

SEQ ID NO: 5738 - protein, 16 aa, Artificial Sequence
  Cyclic GFR-binding peptide
IKPTKGIFYLISIANL

SEQ ID NO: 5739 - protein, 14 aa, Artificial Sequence
  Cyclic GFR-binding peptide
  MOD_RES (14)..(14): Xaa is C or S
FYLVSIANLKTPAX

SEQ ID NO: 5740 - protein, 19 aa, Artificial Sequence
  Cyclic GFR-binding peptide
  MOD_RES (14)..(15): Xaa is C or S
FYLISIANLAQPVXXPAAS

SEQ ID NO: 5741 - protein, 27 aa, Artificial Sequence
  Cyclic GFR-binding peptide
  MOD_RES (21)..(22): Xaa is C or S
VVKDYEDFYLMSIANLETPVXXAKPIS

SEQ ID NO: 5742 - protein, 16 aa, Artificial Sequence
  Cyclic GFR-binding peptide
  MOD_RES (14)..(15): Xaa is C or S
FYLISIANLAQPVXXP

SEQ ID NO: 5743 - protein, 15 aa, Artificial Sequence
  Cyclic GFR-binding peptide
  MOD_RES (14)..(14): Xaa is C or S
FYLVSIANLKTPAXT

SEQ ID NO: 5744 - protein, 20 aa, Artificial Sequence
  Cyclic GFR-binding peptide
  MOD_RES (14)..(14): Xaa is C or S
FYLVSIANLKTPAXTPKTVH

SEQ ID NO: 5745 - protein, 19 aa, Artificial Sequence
  Cyclic GFR-binding peptide
  MOD_RES (14)..(15): Xaa is C or S
FYLISIANLRTPVXXTPPT

SEQ ID NO: 5746 - protein, 16 aa, Artificial Sequence
  Cyclic GFR-binding peptide
VVKDYEDFYLMSIANL

SEQ ID NO: 5747 - protein, 19 aa, Artificial Sequence
  Cyclic GFR-binding peptide
  MOD_RES (14)..(14): Xaa is C or S
FYLVSIANLKTPAXTPKTV

SEQ ID NO: 5748 - protein, 15 aa, Artificial Sequence
  Cyclic GFR-binding peptide
  MOD_RES (14)..(15): Xaa is C or S
FYLISIANLDQPVXX

SEQ ID NO: 5749 - protein, 16 aa, Artificial Sequence
  Cyclic GFR-binding peptide
  MOD_RES (14)..(15): Xaa is C or S
FYLVSIANLKTPAXXP

SEQ ID NO: 5750 - protein, 17 aa, Artificial Sequence
  Cyclic GFR-binding peptide
VVNNASDFYLISIANLR

SEQ ID NO: 5751 - protein, 17 aa, Artificial Sequence
  Cyclic GFR-binding peptide
IVNSSDDFYLVSIANLQ

SEQ ID NO: 5752 - protein, 16 aa, Artificial Sequence
  Cyclic GFR-binding peptide
  MOD_RES (14)..(15): Xaa is C or S
FYLISIANLRTPVXXT

SEQ ID NO: 5753 - protein, 16 aa, Artificial Sequence
  Cyclic GFR-binding peptide
VKPTRGVFYLISIANL

SEQ ID NO: 5754 - protein, 20 aa, Artificial Sequence
  Cyclic GFR-binding peptide
  MOD_RES (14)..(15): Xaa is C or S
FYLISIANLRTPVXXTPPTS

SEQ ID NO: 5755 - protein, 17 aa, Artificial Sequence
  Cyclic GFR-binding peptide
VVKDYEDFYLMSIANLE

SEQ ID NO: 5756 - protein, 20 aa, Artificial Sequence
  Cyclic GFR-binding peptide
  MOD_RES (14)..(15): Xaa is C or S
FYLMSIANLETPVXXAKPIK

SEQ ID NO: 5757 - protein, 17 aa, Artificial Sequence
  Cyclic GFR-binding peptide
IVNSSDDFYLVSIANLK

SEQ ID NO: 5758 - protein, 27 aa, Artificial Sequence
  Cyclic GFR-binding peptide
  MOD_RES (21)..(22): Xaa is C or S
IVNSSDDFYLVSIANLQTPAXXPKPVT

SEQ ID NO: 5759 - protein, 17 aa, Artificial Sequence
  Cyclic GFR-binding peptide
VVKENEDFYLMSIANLE

SEQ ID NO: 5760 - protein, 13 aa, Artificial Sequence
  Cyclic GFR-binding peptide
FYLISIANLRTPV

SEQ ID NO: 5761 - protein, 15 aa, Artificial Sequence
  Cyclic GFR-binding peptide
VVNNASDFYLISIAN

SEQ ID NO: 5762 - protein, 19 aa, Artificial Sequence
  Cyclic GFR-binding peptide
  MOD_RES (14)..(15): Xaa is C or S
FYLMSIANLETPVXXAKPI

SEQ ID NO: 5763 - protein, 27 aa, Artificial Sequence
  Cyclic GFR-binding peptide
  MOD_RES (21)..(22): Xaa is C or S
IVNSSDDFYLVSIANLKTPAXXPKPVY

SEQ ID NO: 5764 - protein, 16 aa, Artificial Sequence
  Cyclic GFR-binding peptide
VVKENEDFYLMSIANL

SEQ ID NO: 5765 - protein, 19 aa, Artificial Sequence
  Cyclic GFR-binding peptide
  MOD_RES (14)..(15): Xaa is C or S
FYLISIANLDQPVXXPSAS

SEQ ID NO: 5766 - protein, 15 aa, Artificial Sequence
  Cyclic GFR-binding peptide
  MOD_RES (14)..(15): Xaa is C or S
FYLMSIANLETPVXX

SEQ ID NO: 5767 - protein, 20 aa, Artificial Sequence
  Cyclic GFR-binding peptide
  MOD_RES (14)..(15): Xaa is C or S
FYLMSIANLETPVXXAKPIS

SEQ ID NO: 5768 - protein, 20 aa, Artificial Sequence
  Cyclic GFR-binding peptide
  MOD_RES (14)..(15): Xaa is C or S
FYLVSIANLKTPAXXPKPVY

SEQ ID NO: 5769 - protein, 16 aa, Artificial Sequence
  Cyclic GFR-binding peptide
  MOD_RES (14)..(15): Xaa is C or S
FYLMSIANLETPVXXA

SEQ ID NO: 5770 - protein, 15 aa, Artificial Sequence
  Cyclic GFR-binding peptide
  MOD_RES (14)..(15): Xaa is C or S
FYLISIANLAQPVXX

SEQ ID NO: 5771 - protein, 13 aa, Artificial Sequence
  Cyclic GFR-binding peptide
FYLISIANLAQPV

SEQ ID NO: 5772 - protein, 18 aa, Artificial Sequence
  Cyclic GFR-binding peptide
IVNSSDDFYLVSIANLQT

SEQ ID NO: 5773 - protein, 18 aa, Artificial Sequence
  Cyclic GFR-binding peptide
VKPTRGVFYLISIANLDQ

SEQ ID NO: 5774 - protein, 19 aa, Artificial Sequence
  Cyclic GFR-binding peptide
IVNSSDDFYLVSIANLKTP

SEQ ID NO: 5775 - protein, 15 aa, Artificial Sequence
  Cyclic GFR-binding peptide
VKPKRGVFYLISIAN

SEQ ID NO: 5776 - protein, 13 aa, Artificial Sequence
  Cyclic GFR-binding peptide
FYLMSIANLETPV

SEQ ID NO: 5777 - protein, 18 aa, Artificial Sequence
  Cyclic GFR-binding peptide
VVKDYEDFYLMSIANLET

SEQ ID NO: 5778 - protein, 18 aa, Artificial Sequence
  Cyclic GFR-binding peptide
VVNNASDFYLISIANLRT

SEQ ID NO: 5779 - protein, 17 aa, Artificial Sequence
  Cyclic GFR-binding peptide
VKPKRGVFYLISIANLA

SEQ ID NO: 5780 - protein, 14 aa, Artificial Sequence
  Cyclic GFR-binding peptide
  MOD_RES (14)..(14): Xaa is C or S
FYLISIANLDQSVX

SEQ ID NO: 5781 - protein, 19 aa, Artificial Sequence
  Cyclic GFR-binding peptide
VKPTRGVFYLISIANLDQP

SEQ ID NO: 5782 - protein, 18 aa, Artificial Sequence
  Cyclic GFR-binding peptide
IVNSSDDFYLVSIANLKT

SEQ ID NO: 5783 - protein, 14 aa, Artificial Sequence
  Cyclic GFR-binding peptide
  MOD_RES (14)..(14): Xaa is C or S
FYLISIANLDQPVX

SEQ ID NO: 5784 - protein, 16 aa, Artificial Sequence
  Cyclic GFR-binding peptide
  MOD_RES (14)..(14): Xaa is C or S
FYLVSIANLKTPAXTP

SEQ ID NO: 5785 - protein, 15 aa, Artificial Sequence
  Cyclic GFR-binding peptide
  MOD_RES (14)..(15): Xaa is C or S
FYLISIANLRTPVXX

SEQ ID NO: 5786 - protein, 13 aa, Artificial Sequence
  Cyclic GFR-binding peptide
FYLISIANLDQPV

SEQ ID NO: 5787 - protein, 16 aa, Artificial Sequence
  Cyclic GFR-binding peptide
IVNSSDDFYLVSIANL

SEQ ID NO: 5788 - protein, 16 aa, Artificial Sequence
  Cyclic GFR-binding peptide
  MOD_RES (14)..(15): Xaa is C or S
FYLISIANLDQSVXXP

SEQ ID NO: 5789 - protein, 16 aa, Artificial Sequence
  Cyclic GFR-binding peptide
VKPKRGVFYLISIANL

SEQ ID NO: 5790 - protein, 17 aa, Artificial Sequence
  Cyclic GFR-binding peptide
  MOD_RES (14)..(15): Xaa is C or S
FYLISIANLDQPVXXPS

SEQ ID NO: 5791 - protein, 19 aa, Artificial Sequence
  Cyclic GFR-binding peptide
VVNNASDFYLISIANLRTP

SEQ ID NO: 5792 - protein, 14 aa, Artificial Sequence
  Cyclic GFR-binding peptide
  MOD_RES (14)..(14): Xaa is C or S
FYLMSIANLETPVX

SEQ ID NO: 5793 - protein, 17 aa, Artificial Sequence
  Cyclic GFR-binding peptide
  MOD_RES (14)..(15): Xaa is C or S
FYLVSIANLKTPAXXPK

SEQ ID NO: 5794 - protein, 20 aa, Artificial Sequence
  Cyclic GFR-binding peptide
  MOD_RES (14)..(15): Xaa is C or S
FYLISIANLDQPVXXPSASA

SEQ ID NO: 5795 - protein, 19 aa, Artificial Sequence
  Cyclic GFR-binding peptide
  MOD_RES (14)..(15): Xaa is C or S
FYLVSIANLKTPAXXPKPV

SEQ ID NO: 5796 - protein, 18 aa, Artificial Sequence
  Cyclic GFR-binding peptide
  MOD_RES (14)..(15): Xaa is C or S
FYLISIANLAQPVXXPAA

SEQ ID NO: 5797 - protein, 20 aa, Artificial Sequence
  Cyclic GFR-binding peptide
  MOD_RES (14)..(15): Xaa is C or S
FYLISIANLAQPVXXPAASA

SEQ ID NO: 5798 - protein, 15 aa, Artificial Sequence
  Cyclic GFR-binding peptide
  MOD_RES (14)..(15): Xaa is C or S
FYLISIANLDQSVXX

SEQ ID NO: 5799 - protein, 19 aa, Artificial Sequence
  Cyclic GFR-binding peptide
VKPKRGVFYLISIANLAQP

SEQ ID NO: 5800 - protein, 18 aa, Artificial Sequence
  Cyclic GFR-binding peptide
  MOD_RES (14)..(15): Xaa is C or S
FYLISIANLDQSVXXPSA

SEQ ID NO: 5801 - protein, 14 aa, Artificial Sequence
  Cyclic GFR-binding peptide
  MOD_RES (14)..(14): Xaa is C or S
FYLISIANLRTPVX

SEQ ID NO: 5802 - protein, 16 aa, Artificial Sequence
  Cyclic GFR-binding peptide
VVNNASDFYLISIANL

SEQ ID NO: 5803 - protein, 15 aa, Artificial Sequence
  Cyclic GFR-binding peptide
IVNSSDDFYLVSIAN

SEQ ID NO: 5804 - protein, 15 aa, Artificial Sequence
  Cyclic GFR-binding peptide
VVKENEDFYLMSIAN

SEQ ID NO: 5805 - protein, 18 aa, Artificial Sequence
  Cyclic GFR-binding peptide
  MOD_RES (14)..(15): Xaa is C or S
FYLMSIANLETPVXXAKP

SEQ ID NO: 5806 - protein, 17 aa, Artificial Sequence
  Cyclic GFR-binding peptide
  MOD_RES (14)..(14): Xaa is C or S
FYLVSIANLKTPAXTPK

SEQ ID NO: 5807 - protein, 18 aa, Artificial Sequence
  Cyclic GFR-binding peptide
  MOD_RES (14)..(14): Xaa is C or S
FYLVSIANLKTPAXTPKT

SEQ ID NO: 5808 - protein, 18 aa, Artificial Sequence
  Cyclic GFR-binding peptide
IKPTKGIFYLISIANLDQ

SEQ ID NO: 5809 - protein, 15 aa, Artificial Sequence
  Cyclic GFR-binding peptide
VVKDYEDFYLMSIAN

SEQ ID NO: 5810 - protein, 15 aa, Artificial Sequence
  Cyclic GFR-binding peptide
VKPTRGVFYLISIAN

SEQ ID NO: 5811 - protein, 27 aa, Artificial Sequence
  Cyclic GFR-binding peptide
  MOD_RES (21)..(22): Xaa is C or S
VKPKRGVFYLISIANLAQPVXXPAASA

SEQ ID NO: 5812 - protein, 15 aa, Artificial Sequence
  Cyclic GFR-binding peptide
  MOD_RES (14)..(15): Xaa is C or S
FYLVSIANLKTPAXX

SEQ ID NO: 5813 - protein, 20 aa, Artificial Sequence
  Cyclic GFR-binding peptide
  MOD_RES (14)..(15): Xaa is C or S
FYLISIANLDQSVXXPSASA

SEQ ID NO: 5814 - protein, 17 aa, Artificial Sequence
  Cyclic GFR-binding peptide
  MOD_RES (14)..(15): Xaa is C or S
FYLISIANLRTPVXXTP

SEQ ID NO: 5815 - protein, 17 aa, Artificial Sequence
  Cyclic GFR-binding peptide
VKPTRGVFYLISIANLD

SEQ ID NO: 5816 - protein, 13 aa, Artificial Sequence
  Cyclic GFR-binding peptide
FYLISIANLDQSV

SEQ ID NO: 5817 - protein, 17 aa, Artificial Sequence
  Cyclic GFR-binding peptide
  MOD_RES (14)..(15): Xaa is C or S
FYLMSIANLETPVXXAK

SEQ ID NO: 5818 - protein, 19 aa, Artificial Sequence
  Cyclic GFR-binding peptide
IVNSSDDFYLVSIANLQTP

SEQ ID NO: 5819 - protein, 27 aa, Artificial Sequence
  Cyclic GFR-binding peptide
  MOD_RES (21)..(21): Xaa is C or S
IVNSSDDFYLVSIANLKTPAXTPKTVH

SEQ ID NO: 5820 - protein, 17 aa, Artificial Sequence
  Cyclic GFR-binding peptide
  MOD_RES (14)..(15): Xaa is C or S
FYLISIANLAQPVXXPA

SEQ ID NO: 5821 - protein, 18 aa, Artificial Sequence
  Cyclic GFR-binding peptide
  MOD_RES (14)..(15): Xaa is C or S
FYLISIANLDQPVXXPSA

SEQ ID NO: 5822 - protein, 18 aa, Artificial Sequence
  Cyclic GFR-binding peptide
  MOD_RES (14)..(15): Xaa is C or S
FYLVSIANLKTPAXXPKP

SEQ ID NO: 5823 - protein, 17 aa, Artificial Sequence
  Cyclic GFR-binding peptide
  MOD_RES (14)..(15): Xaa is C or S
FYLISIANLDQSVXXPS

SEQ ID NO: 5824 - protein, 16 aa, Artificial Sequence
  Cyclic GFR-binding peptide
  MOD_RES (14)..(15): Xaa is C or S
FYLISIANLDQPVXXP

SEQ ID NO: 5825 - protein, 27 aa, Artificial Sequence
  Cyclic GFR-binding peptide
  MOD_RES (21)..(22): Xaa is C or S
IKPTKGIFYLISIANLDQSVXXPSASA

SEQ ID NO: 5826 - protein, 19 aa, Artificial Sequence
  Cyclic GFR-binding peptide
VVKDYEDFYLMSIANLETP

SEQ ID NO: 5827 - protein, 15 aa, Artificial Sequence
  Cyclic GFR-binding peptide
NAISILYFIGKTPKI

SEQ ID NO: 5828 - protein, 18 aa, Artificial Sequence
  Cyclic GFR-binding peptide
  MOD_RES (4)..(5): Xaa is C or S
PPTXXVPTRLNAISILYF

SEQ ID NO: 5829 - protein, 27 aa, Artificial Sequence
  Cyclic GFR-binding peptide
  MOD_RES (6)..(7): Xaa is C or S
STPPTXXVPTRLNAISILYFDSANNVV

SEQ ID NO: 5830 - protein, 19 aa, Artificial Sequence
  Cyclic GFR-binding peptide
PTELNAISMLYFDENEKVV

SEQ ID NO: 5831 - protein, 27 aa, Artificial Sequence
  Cyclic GFR-binding peptide
  MOD_RES (6)..(7): Xaa is C or S
KIPKAXXVPTELNAISMLYFDENEKVV

SEQ ID NO: 5832 - protein, 14 aa, Artificial Sequence
  Cyclic GFR-binding peptide
  MOD_RES (1)..(1): Xaa is C or S
XVPQALNAISILYF

SEQ ID NO: 5833 - protein, 27 aa, Artificial Sequence
  Cyclic GFR-binding peptide
  MOD_RES (6)..(7): Xaa is C or S
ASASPXXVPQDLNAISILYFVGRTPKV

SEQ ID NO: 5834 - protein, 18 aa, Artificial Sequence
  Cyclic GFR-binding peptide
TELNAISMLYFDENEKVV

SEQ ID NO: 5835 - protein, 17 aa, Artificial Sequence
  Cyclic GFR-binding peptide
DLNAISILYFIGKTPKI

SEQ ID NO: 5836 - protein, 19 aa, Artificial Sequence
  Cyclic GFR-binding peptide
  MOD_RES (5)..(6): Xaa is C or S
SASPXXVSQDLNAISILYF

SEQ ID NO: 5837 - protein, 19 aa, Artificial Sequence
  Cyclic GFR-binding peptide
SQDLNAISILYFIGKTPKI

SEQ ID NO: 5838 - protein, 18 aa, Artificial Sequence
  Cyclic GFR-binding peptide
QALNAISILYFVGRKPKV

SEQ ID NO: 5839 - protein, 16 aa, Artificial Sequence
  Cyclic GFR-binding peptide
LNAISILYFIGKTPKI

SEQ ID NO: 5840 - protein, 19 aa, Artificial Sequence
  Cyclic GFR-binding peptide
  MOD_RES (5)..(6): Xaa is C or S
SAAPXXVPQALNAISILYF

SEQ ID NO: 5841 - protein, 27 aa, Artificial Sequence
  Cyclic GFR-binding peptide
  MOD_RES (6)..(7): Xaa is C or S
SIPKAXXVPTELNAISMLYFDEYDKVV

SEQ ID NO: 5842 - protein, 16 aa, Artificial Sequence
  Cyclic GFR-binding peptide
  MOD_RES (2)..(3): Xaa is C or S
PXXVPQALNAISILYF

SEQ ID NO: 5843 - protein, 19 aa, Artificial Sequence
  Cyclic GFR-binding peptide
  MOD_RES (5)..(6): Xaa is C or S
TPPTXXVPTRLNAISILYF

SEQ ID NO: 5844 - protein, 16 aa, Artificial Sequence
  Cyclic GFR-binding peptide
LNAISMLYFDEYDKVV

SEQ ID NO: 5845 - protein, 15 aa, Artificial Sequence
  Cyclic GFR-binding peptide
  MOD_RES (1)..(2): Xaa is C or S
XXVPQDLNAISILYF

SEQ ID NO: 5846 - protein, 17 aa, Artificial Sequence
  Cyclic GFR-binding peptide
RLNAISILYFDSANNVV

SEQ ID NO: 5847 - protein, 16 aa, Artificial Sequence
  Cyclic GFR-binding peptide
  MOD_RES (2)..(3): Xaa is C or S
TXXVPTRLNAISILYF

SEQ ID NO: 5848 - protein, 16 aa, Artificial Sequence
  Cyclic GFR-binding peptide
LNAISILYFVGRTPKV

SEQ ID NO: 5849 - protein, 20 aa, Artificial Sequence
  Cyclic GFR-binding peptide
  MOD_RES (6)..(7): Xaa is C or S
STPPTXXVPTRLNAISILYF

SEQ ID NO: 5850 - protein, 17 aa, Artificial Sequence
  Cyclic GFR-binding peptide
ELNAISMLYFDEYDKVV

SEQ ID NO: 5851 - protein, 20 aa, Artificial Sequence
  Cyclic GFR-binding peptide
  MOD_RES (6)..(7): Xaa is C or S
KIPKAXXVPTELNAISMLYF

SEQ ID NO: 5852 - protein, 17 aa, Artificial Sequence
  Cyclic GFR-binding peptide
ELNAISMLYFDENEKVV

SEQ ID NO: 5853 - protein, 13 aa, Artificial Sequence
  Cyclic GFR-binding peptide
VPTRLNAISILYF

SEQ ID NO: 5854 - protein, 15 aa, Artificial Sequence
  Cyclic GFR-binding peptide
NAISILYFDSANNVV

SEQ ID NO: 5855 - protein, 19 aa, Artificial Sequence
  Cyclic GFR-binding peptide
  MOD_RES (5)..(6): Xaa is C or S
IPKAXXVPTELNAISMLYF

SEQ ID NO: 5856 - protein, 16 aa, Artificial Sequence
  Cyclic GFR-binding peptide
LNAISMLYFDENEKVV

SEQ ID NO: 5857 - protein, 19 aa, Artificial Sequence
  Cyclic GFR-binding peptide
  MOD_RES (5)..(6): Xaa is C or S
SASPXXVPQDLNAISILYF

SEQ ID NO: 5858 - protein, 15 aa, Artificial Sequence
  Cyclic GFR-binding peptide
  MOD_RES (1)..(2): Xaa is C or S
XXVPTELNAISMLYF

SEQ ID NO: 5859 - protein, 20 aa, Artificial Sequence
  Cyclic GFR-binding peptide
  MOD_RES (6)..(7): Xaa is C or S
SIPKAXXVPTELNAISMLYF

SEQ ID NO: 5860 - protein, 16 aa, Artificial Sequence
  Cyclic GFR-binding peptide
  MOD_RES (2)..(3): Xaa is C or S
AXXVPTELNAISMLYF

SEQ ID NO: 5861 - protein, 15 aa, Artificial Sequence
  Cyclic GFR-binding peptide
  MOD_RES (1)..(2): Xaa is C or S
XXVPQALNAISILYF

SEQ ID NO: 5862 - protein, 13 aa, Artificial Sequence
  Cyclic GFR-binding peptide
VPQALNAISILYF

SEQ ID NO: 5863 - protein, 18 aa, Artificial Sequence
  Cyclic GFR-binding peptide
QDLNAISILYFVGRTPKV

SEQ ID NO: 5864 - protein, 15 aa, Artificial Sequence
  Cyclic GFR-binding peptide
NAISILYFVGRKPKV

SEQ ID NO: 5865 - protein, 13 aa, Artificial Sequence
  Cyclic GFR-binding peptide
VPTELNAISMLYF

SEQ ID NO: 5866 - protein, 18 aa, Artificial Sequence
  Cyclic GFR-binding peptide
TELNAISMLYFDEYDKVV

SEQ ID NO: 5867 - protein, 18 aa, Artificial Sequence
  Cyclic GFR-binding peptide
TRLNAISILYFDSANNVV

SEQ ID NO: 5868 - protein, 17 aa, Artificial Sequence
  Cyclic GFR-binding peptide
ALNAISILYFVGRKPKV

SEQ ID NO: 5869 - protein, 14 aa, Artificial Sequence
  Cyclic GFR-binding peptide
  MOD_RES (1)..(1): Xaa is C or S
XVSQDLNAISILYF

SEQ ID NO: 5870 - protein, 19 aa, Artificial Sequence
  Cyclic GFR-binding peptide
PQDLNAISILYFVGRTPKV

SEQ ID NO: 5871 - protein, 14 aa, Artificial Sequence
  Cyclic GFR-binding peptide
  MOD_RES (1)..(1): Xaa is C or S
XVPQDLNAISILYF

SEQ ID NO: 5872 - protein, 15 aa, Artificial Sequence
  Cyclic GFR-binding peptide
  MOD_RES (1)..(2): Xaa is C or S
XXVPTRLNAISILYF

SEQ ID NO: 5873 - protein, 13 aa, Artificial Sequence
  Cyclic GFR-binding peptide
VPQDLNAISILYF

SEQ ID NO: 5874 - protein, 16 aa, Artificial Sequence
  Cyclic GFR-binding peptide
  MOD_RES (2)..(3): Xaa is C or S
PXXVSQDLNAISILYF

SEQ ID NO: 5875 - protein, 16 aa, Artificial Sequence
  Cyclic GFR-binding peptide
LNAISILYFVGRKPKV

SEQ ID NO: 5876 - protein, 17 aa, Artificial Sequence
  Cyclic GFR-binding peptide
  MOD_RES (3)..(4): Xaa is C or S
SPXXVPQDLNAISILYF

SEQ ID NO: 5877 - protein, 19 aa, Artificial Sequence
  Cyclic GFR-binding peptide
PTRLNAISILYFDSANNVV

SEQ ID NO: 5878 - protein, 14 aa, Artificial Sequence
  Cyclic GFR-binding peptide
  MOD_RES (1)..(1): Xaa is C or S
XVPTELNAISMLYF

SEQ ID NO: 5879 - protein, 20 aa, Artificial Sequence
  Cyclic GFR-binding peptide
  MOD_RES (6)..(7): Xaa is C or S
ASASPXXVPQDLNAISILYF

SEQ ID NO: 5880 - protein, 18 aa, Artificial Sequence
  Cyclic GFR-binding peptide
  MOD_RES (4)..(5): Xaa is C or S
AAPXXVPQALNAISILYF

SEQ ID NO: 5881 - protein, 20 aa, Artificial Sequence
  Cyclic GFR-binding peptide
  MOD_RES (6)..(7): Xaa is C or S
ASAAPXXVPQALNAISILYF

SEQ ID NO: 5882 - protein, 15 aa, Artificial Sequence
  Cyclic GFR-binding peptide
  MOD_RES (1)..(2): Xaa is C or S
XXVSQDLNAISILYF

SEQ ID NO: 5883 - protein, 19 aa, Artificial Sequence
  Cyclic GFR-binding peptide
PQALNAISILYFVGRKPKV

SEQ ID NO: 5884 - protein, 18 aa, Artificial Sequence
  Cyclic GFR-binding peptide
  MOD_RES (4)..(5): Xaa is C or S
ASPXXVSQDLNAISILYF

SEQ ID NO: 5885 - protein, 14 aa, Artificial Sequence
  Cyclic GFR-binding peptide
  MOD_RES (1)..(1): Xaa is C or S
XVPTRLNAISILYF

SEQ ID NO: 5886 - protein, 16 aa, Artificial Sequence
  Cyclic GFR-binding peptide
LNAISILYFDSANNVV

SEQ ID NO: 5887 - protein, 15 aa, Artificial Sequence
  Cyclic GFR-binding peptide
NAISMLYFDENEKVV

SEQ ID NO: 5888 - protein, 18 aa, Artificial Sequence
  Cyclic GFR-binding peptide
  MOD_RES (4)..(5): Xaa is C or S
PKAXXVPTELNAISMLYF

SEQ ID NO: 5889 - protein, 18 aa, Artificial Sequence
  Cyclic GFR-binding peptide
QDLNAISILYFIGKTPKI

SEQ ID NO: 5890 - protein, 15 aa, Artificial Sequence
  Cyclic GFR-binding peptide
NAISMLYFDEYDKVV

SEQ ID NO: 5891 - protein, 15 aa, Artificial Sequence
  Cyclic GFR-binding peptide
NAISILYFVGRTPKV

SEQ ID NO: 5892 - protein, 27 aa, Artificial Sequence
  Cyclic GFR-binding peptide
  MOD_RES (6)..(7): Xaa is C or S
ASAAPXXVPQALNAISILYFVGRKPKV

SEQ ID NO: 5893 - protein, 20 aa, Artificial Sequence
  Cyclic GFR-binding peptide
  MOD_RES (6)..(7): Xaa is C or S
ASASPXXVSQDLNAISILYF

SEQ ID NO: 5894 - protein, 17 aa, Artificial Sequence
  Cyclic GFR-binding peptide
  MOD_RES (3)..(4): Xaa is C or S
PTXXVPTRLNAISILYF

SEQ ID NO: 5895 - protein, 17 aa, Artificial Sequence
  Cyclic GFR-binding peptide
DLNAISILYFVGRTPKV

SEQ ID NO: 5896 - protein, 13 aa, Artificial Sequence
  Cyclic GFR-binding peptide
VSQDLNAISILYF

SEQ ID NO: 5897 - protein, 17 aa, Artificial Sequence
  Cyclic GFR-binding peptide
  MOD_RES (3)..(4): Xaa is C or S
KAXXVPTELNAISMLYF

SEQ ID NO: 5898 - protein, 17 aa, Artificial Sequence
  Cyclic GFR-binding peptide
  MOD_RES (3)..(4): Xaa is C or S
APXXVPQALNAISILYF

SEQ ID NO: 5899 - protein, 18 aa, Artificial Sequence
  Cyclic GFR-binding peptide
  MOD_RES (4)..(5): Xaa is C or S
ASPXXVPQDLNAISILYF

SEQ ID NO: 5900 - protein, 17 aa, Artificial Sequence
  Cyclic GFR-binding peptide
  MOD_RES (3)..(4): Xaa is C or S
SPXXVSQDLNAISILYF

SEQ ID NO: 5901 - protein, 16 aa, Artificial Sequence
  Cyclic GFR-binding peptide
  MOD_RES (2)..(3): Xaa is C or S
PXXVPQDLNAISILYF

SEQ ID NO: 5902 - protein, 27 aa, Artificial Sequence
  Cyclic GFR-binding peptide
  MOD_RES (6)..(7): Xaa is C or S
ASASPXXVSQDLNAISILYFIGKTPKI

SEQ ID NO: 5903 - protein, 19 aa, Artificial Sequence
  Cyclic GFR-binding peptide
PTELNAISMLYFDEYDKVV

SEQ ID NO: 5904 - protein, 16 aa, Artificial Sequence
  Cyclic GFR-binding peptide
  MOD_RES (14)..(15): Xaa is C or S
YYLITLPELDQPVXXP

SEQ ID NO: 5905 - protein, 13 aa, Artificial Sequence
  Cyclic GFR-binding peptide
IFLVSIPSLKTPA

SEQ ID NO: 5906 - protein, 14 aa, Artificial Sequence
  Cyclic GFR-binding peptide
  MOD_RES (14)..(14): Xaa is C or S
IFLISIPSLAQPVX

SEQ ID NO: 5907 - protein, 20 aa, Artificial Sequence
  Cyclic GFR-binding peptide
  MOD_RES (14)..(14): Xaa is C or S
IFLVSIPSLKTPAXTPKTVH

SEQ ID NO: 5908 - protein, 27 aa, Artificial Sequence
  Cyclic GFR-binding peptide
  MOD_RES (21)..(22): Xaa is C or S
VVKDYEDYYVMPLPELETPVXXAKPIS

SEQ ID NO: 5909 - protein, 13 aa, Artificial Sequence
  Cyclic GFR-binding peptide
YYVIPLPELDQPV

SEQ ID NO: 5910 - protein, 19 aa, Artificial Sequence
  Cyclic GFR-binding peptide
  MOD_RES (14)..(15): Xaa is C or S
YYLVTLPELKTPAXXPKPV

SEQ ID NO: 5911 - protein, 17 aa, Artificial Sequence
  Cyclic GFR-binding peptide
VVNNASDYYVIPLPELR

SEQ ID NO: 5912 - protein, 15 aa, Artificial Sequence
  Cyclic GFR-binding peptide
VKPTRGVYYLITLPE

SEQ ID NO: 5913 - protein, 16 aa, Artificial Sequence
  Cyclic GFR-binding peptide
VVNNAADIYLISIPSL

SEQ ID NO: 5914 - protein, 15 aa, Artificial Sequence
  Cyclic GFR-binding peptide
VKPTRGVIFLISIPS

SEQ ID NO: 5915 - protein, 20 aa, Artificial Sequence
  Cyclic GFR-binding peptide
  MOD_RES (14)..(15): Xaa is C or S
YYLITLPELDQSVXXPSASA

SEQ ID NO: 5916 - protein, 15 aa, Artificial Sequence
  Cyclic GFR-binding peptide
  MOD_RES (14)..(15): Xaa is C or S
YYLITLPELDQPVXX

SEQ ID NO: 5917 - protein, 17 aa, Artificial Sequence
  Cyclic GFR-binding peptide
  MOD_RES (14)..(15): Xaa is C or S
YYLVTLPELQTPAXXPK

SEQ ID NO: 5918 - protein, 18 aa, Artificial Sequence
  Cyclic GFR-binding peptide
  MOD_RES (14)..(14): Xaa is C or S
YYLVTLPELKTPAXTPKT

SEQ ID NO: 5919 - protein, 16 aa, Artificial Sequence
  Cyclic GFR-binding peptide
  MOD_RES (14)..(15): Xaa is C or S
YYVVPLPELKTPAXXP

SEQ ID NO: 5920 - protein, 15 aa, Artificial Sequence
  Cyclic GFR-binding peptide
VVKDYEDIFLMSIPS

SEQ ID NO: 5921 - protein, 16 aa, Artificial Sequence
  Cyclic GFR-binding peptide
  MOD_RES (14)..(14): Xaa is C or S
YYLVTLPELKTPAXTP

SEQ ID NO: 5922 - protein, 19 aa, Artificial Sequence
  Cyclic GFR-binding peptide
VVNNASDIFLISIPSLRTP

SEQ ID NO: 5923 - protein, 19 aa, Artificial Sequence
  Cyclic GFR-binding peptide
  MOD_RES (14)..(15): Xaa is C or S
IFLISIPSLDQPVXXPSAS

SEQ ID NO: 5924 - protein, 20 aa, Artificial Sequence
  Cyclic GFR-binding peptide
  MOD_RES (14)..(15): Xaa is C or S
IYLMSIPSMKTPTXXPGASG

SEQ ID NO: 5925 - protein, 20 aa, Artificial Sequence
  Cyclic GFR-binding peptide
  MOD_RES (14)..(15): Xaa is C or S
IFLVSIPSLKTPAXXPKPVY

SEQ ID NO: 5926 - protein, 16 aa, Artificial Sequence
  Cyclic GFR-binding peptide
  MOD_RES (14)..(15): Xaa is C or S
IFLMSIPSLETPVXXA

SEQ ID NO: 5927 - protein, 20 aa, Artificial Sequence
  Cyclic GFR-binding peptide
  MOD_RES (14)..(15): Xaa is C or S
IFLMSIPSLETPVXXAKPIS

SEQ ID NO: 5928 - protein, 15 aa, Artificial Sequence
  Cyclic GFR-binding peptide
  MOD_RES (14)..(15): Xaa is C or S
IYLMSIPSTKVPAXX

SEQ ID NO: 5929 - protein, 13 aa, Artificial Sequence
  Cyclic GFR-binding peptide
YYLMTLPELETPV

SEQ ID NO: 5930 - protein, 19 aa, Artificial Sequence
  Cyclic GFR-binding peptide
  MOD_RES (14)..(15): Xaa is C or S
YYVVPLPELKTPAXXPKPV

SEQ ID NO: 5931 - protein, 15 aa, Artificial Sequence
  Cyclic GFR-binding peptide
  MOD_RES (14)..(15): Xaa is C or S
YYLMTLPELETPVXX

SEQ ID NO: 5932 - protein, 14 aa, Artificial Sequence
  Cyclic GFR-binding peptide
  MOD_RES (14)..(14): Xaa is C or S
YYLITLPELDQSVX

SEQ ID NO: 5933 - protein, 14 aa, Artificial Sequence
  Cyclic GFR-binding peptide
  MOD_RES (14)..(14): Xaa is C or S
IYLISIPSLKTPVX

SEQ ID NO: 5934 - protein, 18 aa, Artificial Sequence
  Cyclic GFR-binding peptide
  MOD_RES (14)..(15): Xaa is C or S
IYLMSIPSLETPVXXAKP

SEQ ID NO: 5935 - protein, 15 aa, Artificial Sequence
  Cyclic GFR-binding peptide
  MOD_RES (14)..(15): Xaa is C or S
IFLISIPSLDQSVXX

SEQ ID NO: 5936 - protein, 16 aa, Artificial Sequence
  Cyclic GFR-binding peptide
  MOD_RES (14)..(15): Xaa is C or S
YYVIPLPELDQPVXXP

SEQ ID NO: 5937 - protein, 18 aa, Artificial Sequence
  Cyclic GFR-binding peptide
IVNSSDDIFLVSIPSLKT

SEQ ID NO: 5938 - protein, 18 aa, Artificial Sequence
  Cyclic GFR-binding peptide
VKPTRGVYYLITLPELDQ

SEQ ID NO: 5939 - protein, 17 aa, Artificial Sequence
  Cyclic GFR-binding peptide
  MOD_RES (14)..(14): Xaa is C or S
IFLVSIPSLKTPAXTPK

SEQ ID NO: 5940 - protein, 20 aa, Artificial Sequence
  Cyclic GFR-binding peptide
  MOD_RES (14)..(15): Xaa is C or S
YYVIPLPELDQSVXXPSASA

SEQ ID NO: 5941 - protein, 17 aa, Artificial Sequence
  Cyclic GFR-binding peptide
  MOD_RES (14)..(15): Xaa is C or S
YYVVPLPELQTPAXXPK

SEQ ID NO: 5942 - protein, 17 aa, Artificial Sequence
  Cyclic GFR-binding peptide
VKPTRGVYYVIPLPELD

SEQ ID NO: 5943 - protein, 19 aa, Artificial Sequence
  Cyclic GFR-binding peptide
IKPTKGIYYLITLPELDQS

SEQ ID NO: 5944 - protein, 14 aa, Artificial Sequence
  Cyclic GFR-binding peptide
  MOD_RES (14)..(14): Xaa is C or S
YYVVPLPELQTPAX

SEQ ID NO: 5945 - protein, 18 aa, Artificial Sequence
  Cyclic GFR-binding peptide
VVKENEDYYLMTLPELET

SEQ ID NO: 5946 - protein, 16 aa, Artificial Sequence
  Cyclic GFR-binding peptide
IKPTKGIIFLISIPSL

SEQ ID NO: 5947 - protein, 17 aa, Artificial Sequence
  Cyclic GFR-binding peptide
  MOD_RES (14)..(14): Xaa is C or S
YYVVPLPELKTPAXTPK

SEQ ID NO: 5948 - protein, 18 aa, Artificial Sequence
  Cyclic GFR-binding peptide
IVNSSDDIFLVSIPSLQT

SEQ ID NO: 5949 - protein, 19 aa, Artificial Sequence
  Cyclic GFR-binding peptide
VVNNASDIYLISIPSLRTP

SEQ ID NO: 5950 - protein, 16 aa, Artificial Sequence
  Cyclic GFR-binding peptide
IKPTKGIYYLITLPEL

SEQ ID NO: 5951 - protein, 19 aa, Artificial Sequence
  Cyclic GFR-binding peptide
  MOD_RES (14)..(15): Xaa is C or S
IFLMSIPSLETPVXXAKPI

SEQ ID NO: 5952 - protein, 18 aa, Artificial Sequence
  Cyclic GFR-binding peptide
VVKENEDIFLMSIPSLET

SEQ ID NO: 5953 - protein, 16 aa, Artificial Sequence
  Cyclic GFR-binding peptide
  MOD_RES (14)..(14): Xaa is C or S
YYVVPLPELKTPAXTP

SEQ ID NO: 5954 - protein, 17 aa, Artificial Sequence
  Cyclic GFR-binding peptide
  MOD_RES (14)..(15): Xaa is C or S
YYVIPLPELDQSVXXPS

SEQ ID NO: 5955 - protein, 16 aa, Artificial Sequence
  Cyclic GFR-binding peptide
  MOD_RES (14)..(15): Xaa is C or S
YYLVTLPELKTPAXXP

SEQ ID NO: 5956 - protein, 19 aa, Artificial Sequence
  Cyclic GFR-binding peptide
IVNSSDDYYVVPLPELKTP

SEQ ID NO: 5957 - protein, 15 aa, Artificial Sequence
  Cyclic GFR-binding peptide
VVKENEDYYVMPLPE

SEQ ID NO: 5958 - protein, 19 aa, Artificial Sequence
  Cyclic GFR-binding peptide
  MOD_RES (14)..(15): Xaa is C or S
IFLISIPSLAQPVXXPAAS

SEQ ID NO: 5959 - protein, 14 aa, Artificial Sequence
  Cyclic GFR-binding peptide
  MOD_RES (14)..(14): Xaa is C or S
YYVIPLPELRTPVX

SEQ ID NO: 5960 - protein, 19 aa, Artificial Sequence
  Cyclic GFR-binding peptide
IVNSSDDYYVVPLPELQTP

SEQ ID NO: 5961 - protein, 20 aa, Artificial Sequence
  Cyclic GFR-binding peptide
  MOD_RES (14)..(15): Xaa is C or S
YYLMTLPELETPVXXAKPIK

SEQ ID NO: 5962 - protein, 15 aa, Artificial Sequence
  Cyclic GFR-binding peptide
VVKDYEDYYLMTLPE

SEQ ID NO: 5963 - protein, 15 aa, Artificial Sequence
  Cyclic GFR-binding peptide
  MOD_RES (14)..(15): Xaa is C or S
YYVVPLPELKTPAXX

SEQ ID NO: 5964 - protein, 18 aa, Artificial Sequence
  Cyclic GFR-binding peptide
IVNSSDDIYLVSIPSLQT

SEQ ID NO: 5965 - protein, 18 aa, Artificial Sequence
  Cyclic GFR-binding peptide
IVNSSDDIYLVSIPSLKT

SEQ ID NO: 5966 - protein, 13 aa, Artificial Sequence
  Cyclic GFR-binding peptide
IFLISIPSLDQPV

SEQ ID NO: 5967 - protein, 15 aa, Artificial Sequence
  Cyclic GFR-binding peptide
  MOD_RES (14)..(14): Xaa is C or S
IFLVSIPSLKTPAXT

SEQ ID NO: 5968 - protein, 13 aa, Artificial Sequence
  Cyclic GFR-binding peptide
YYVVPLPELKTPA

SEQ ID NO: 5969 - protein, 13 aa, Artificial Sequence
  Cyclic GFR-binding peptide
IFLMSIPSLETPV

SEQ ID NO: 5970 - protein, 17 aa, Artificial Sequence
  Cyclic GFR-binding peptide
VVKDYEDIFLMSIPSLE

SEQ ID NO: 5971 - protein, 20 aa, Artificial Sequence
  Cyclic GFR-binding peptide
  MOD_RES (14)..(15): Xaa is C or S
YYVMPLPELETPVXXAKPIS

SEQ ID NO: 5972 - protein, 16 aa, Artificial Sequence
  Cyclic GFR-binding peptide
  MOD_RES (14)..(15): Xaa is C or S
YYLITLPELRTPVXXT

SEQ ID NO: 5973 - protein, 27 aa, Artificial Sequence
  Cyclic GFR-binding peptide
  MOD_RES (21)..(22): Xaa is C or S
IVNSSDDIFLVSIPSLQTPAXXPKPVT

SEQ ID NO: 5974 - protein, 14 aa, Artificial Sequence
  Cyclic GFR-binding peptide
  MOD_RES (14)..(14): Xaa is C or S
YYLITLPELRTPVX

SEQ ID NO: 5975 - protein, 16 aa, Artificial Sequence
  Cyclic GFR-binding peptide
VVNNASDIFLISIPSL

SEQ ID NO: 5976 - protein, 14 aa, Artificial Sequence
  Cyclic GFR-binding peptide
  MOD_RES (14)..(14): Xaa is C or S
YYLVTLPELKTPAX

SEQ ID NO: 5977 - protein, 16 aa, Artificial Sequence
  Cyclic GFR-binding peptide
  MOD_RES (14)..(14): Xaa is C or S
IFLVSIPSLKTPAXTP

SEQ ID NO: 5978 - protein, 17 aa, Artificial Sequence
  Cyclic GFR-binding peptide
  MOD_RES (14)..(14): Xaa is C or S
YYLVTLPELKTPAXTPK

SEQ ID NO: 5979 - protein, 14 aa, Artificial Sequence
  Cyclic GFR-binding peptide
  MOD_RES (14)..(14): Xaa is C or S
IFLISIPSLDQSVX

SEQ ID NO: 5980 - protein, 19 aa, Artificial Sequence
  Cyclic GFR-binding peptide
VKPKRGVYYLITLPELAQP

SEQ ID NO: 5981 - protein, 17 aa, Artificial Sequence
  Cyclic GFR-binding peptide
VVKENEDYYVMPLPELE

SEQ ID NO: 5982 - protein, 19 aa, Artificial Sequence
  Cyclic GFR-binding peptide
  MOD_RES (14)..(14): Xaa is C or S
YYLVTLPELKTPAXTPKTV

SEQ ID NO: 5983 - protein, 17 aa, Artificial Sequence
  Cyclic GFR-binding peptide
  MOD_RES (14)..(15): Xaa is C or S
IYLMSIPSMKTPTXXPG

SEQ ID NO: 5984 - protein, 14 aa, Artificial Sequence
  Cyclic GFR-binding peptide
  MOD_RES (14)..(14): Xaa is C or S
IYLMSIPSTKVPAX

SEQ ID NO: 5985 - protein, 18 aa, Artificial Sequence
  Cyclic GFR-binding peptide
VKPKRGVIFLISIPSLAQ

SEQ ID NO: 5986 - protein, 15 aa, Artificial Sequence
  Cyclic GFR-binding peptide
  MOD_RES (14)..(14): Xaa is C or S
YYVVPLPELKTPAXT

SEQ ID NO: 5987 - protein, 16 aa, Artificial Sequence
  Cyclic GFR-binding peptide
  MOD_RES (14)..(15): Xaa is C or S
YYLMTLPELETPVXXA

SEQ ID NO: 5988 - protein, 17 aa, Artificial Sequence
  Cyclic GFR-binding peptide
VKPKRGVYYVIPLPELA

SEQ ID NO: 5989 - protein, 20 aa, Artificial Sequence
  Cyclic GFR-binding peptide
  MOD_RES (14)..(15): Xaa is C or S
IFLISIPSLDQSVXXPSASA

SEQ ID NO: 5990 - protein, 18 aa, Artificial Sequence
  Cyclic GFR-binding peptide
VKPKRGVYYLITLPELAQ

SEQ ID NO: 5991 - protein, 16 aa, Artificial Sequence
  Cyclic GFR-binding peptide
VKPTRGVYYVIPLPEL

SEQ ID NO: 5992 - protein, 14 aa, Artificial Sequence
  Cyclic GFR-binding peptide
  MOD_RES (14)..(14): Xaa is C or S
YYLVTLPELQTPAX

SEQ ID NO: 5993 - protein, 15 aa, Artificial Sequence
  Cyclic GFR-binding peptide
  MOD_RES (14)..(15): Xaa is C or S
YYVIPLPELDQPVXX

SEQ ID NO: 5994 - protein, 13 aa, Artificial Sequence
  Cyclic GFR-binding peptide
IFLISIPSLDQSV

SEQ ID NO: 5995 - protein, 19 aa, Artificial Sequence
  Cyclic GFR-binding peptide
  MOD_RES (14)..(15): Xaa is C or S
IYLISIPSLRTPVXXTPPT

SEQ ID NO: 5996 - protein, 18 aa, Artificial Sequence
  Cyclic GFR-binding peptide
  MOD_RES (14)..(15): Xaa is C or S
IFLISIPSLDQPVXXPSA

SEQ ID NO: 5997 - protein, 17 aa, Artificial Sequence
  Cyclic GFR-binding peptide
LLVRGNDIYLMSIPSTK

SEQ ID NO: 5998 - protein, 27 aa, Artificial Sequence
  Cyclic GFR-binding peptide
  MOD_RES (21)..(22): Xaa is C or S
VVNNASDIYLISIPSLRTPVXXTPPTS

SEQ ID NO: 5999 - protein, 20 aa, Artificial Sequence
  Cyclic GFR-binding peptide
  MOD_RES (14)..(14): Xaa is C or S
YYVVPLPELKTPAXTPKTVH

SEQ ID NO: 6000 - protein, 16 aa, Artificial Sequence
  Cyclic GFR-binding peptide
VKPKRGVIFLISIPSL

SEQ ID NO: 6001 - protein, 19 aa, Artificial Sequence
  Cyclic GFR-binding peptide
  MOD_RES (14)..(15): Xaa is C or S
YYLMTLPELETPVXXAKPI

SEQ ID NO: 6002 - protein, 15 aa, Artificial Sequence
  Cyclic GFR-binding peptide
  MOD_RES (14)..(15): Xaa is C or S
IFLISIPSLAQPVXX

SEQ ID NO: 6003 - protein, 16 aa, Artificial Sequence
  Cyclic GFR-binding peptide
  MOD_RES (14)..(15): Xaa is C or S
IFLISIPSLDQPVXXP

SEQ ID NO: 6004 - protein, 17 aa, Artificial Sequence
  Cyclic GFR-binding peptide
  MOD_RES (14)..(15): Xaa is C or S
YYLMTLPELETPVXXAK

SEQ ID NO: 6005 - protein, 19 aa, Artificial Sequence
  Cyclic GFR-binding peptide
VVKENEDYYLMTLPELETP

SEQ ID NO: 6006 - protein, 18 aa, Artificial Sequence
  Cyclic GFR-binding peptide
VVKENEDIYLMSIPSLET

SEQ ID NO: 6007 - protein, 27 aa, Artificial Sequence
  Cyclic GFR-binding peptide
  MOD_RES (21)..(22): Xaa is C or S
IKPTKGIIFLISIPSLDQSVXXPSASA

SEQ ID NO: 6008 - protein, 27 aa, Artificial Sequence
  Cyclic GFR-binding peptide
  MOD_RES (21)..(21): Xaa is C or S
IVNSSDDIYLVSIPSLKTPAXTPKTVH

SEQ ID NO: 6009 - protein, 16 aa, Artificial Sequence
  Cyclic GFR-binding peptide
  MOD_RES (14)..(15): Xaa is C or S
IFLVSIPSLKTPAXXP

SEQ ID NO: 6010 - protein, 15 aa, Artificial Sequence
  Cyclic GFR-binding peptide
YTVVGKDIYLISIPS

SEQ ID NO: 6011 - protein, 17 aa, Artificial Sequence
  Cyclic GFR-binding peptide
  MOD_RES (14)..(15): Xaa is C or S
YYLITLPELAQPVXXPA

SEQ ID NO: 6012 - protein, 20 aa, Artificial Sequence
  Cyclic GFR-binding peptide
  MOD_RES (14)..(15): Xaa is C or S
IYLVSIPSLKTPAXXPKPVH

SEQ ID NO: 6013 - protein, 19 aa, Artificial Sequence
  Cyclic GFR-binding peptide
  MOD_RES (14)..(15): Xaa is C or S
YYVIPLPELDQPVXXPSAS

SEQ ID NO: 6014 - protein, 19 aa, Artificial Sequence
  Cyclic GFR-binding peptide
IKPTKGIIFLISIPSLDQS

SEQ ID NO: 6015 - protein, 27 aa, Artificial Sequence
  Cyclic GFR-binding peptide
  MOD_RES (21)..(22): Xaa is C or S
IVNSSDDYYLVTLPELKTPAXXPKPVY

SEQ ID NO: 6016 - protein, 27 aa, Artificial Sequence
  Cyclic GFR-binding peptide
  MOD_RES (21)..(22): Xaa is C or S
VVNNASDIFLISIPSLRTPVXXTPPTS

SEQ ID NO: 6017 - protein, 17 aa, Artificial Sequence
  Cyclic GFR-binding peptide
  MOD_RES (14)..(15): Xaa is C or S
IYLMSIPSLETPVXXAK

SEQ ID NO: 6018 - protein, 19 aa, Artificial Sequence
  Cyclic GFR-binding peptide
VVKDYEDIFLMSIPSLETP

SEQ ID NO: 6019 - protein, 15 aa, Artificial Sequence
  Cyclic GFR-binding peptide
IVNNSSDIYLVSIPS

SEQ ID NO: 6020 - protein, 19 aa, Artificial Sequence
  Cyclic GFR-binding peptide
VVKDYEDIYLMSIPSLETP

SEQ ID NO: 6021 - protein, 14 aa, Artificial Sequence
  Cyclic GFR-binding peptide
  MOD_RES (14)..(14): Xaa is C or S
IFLVSIPSLQTPAX

SEQ ID NO: 6022 - protein, 19 aa, Artificial Sequence
  Cyclic GFR-binding peptide
  MOD_RES (14)..(15): Xaa is C or S
IFLVSIPSLQTPAXXPKPV

SEQ ID NO: 6023 - protein, 17 aa, Artificial Sequence
  Cyclic GFR-binding peptide
IKPTKGIIFLISIPSLD

SEQ ID NO: 6024 - protein, 16 aa, Artificial Sequence
  Cyclic GFR-binding peptide
VVNNASDIYLISIPSL

SEQ ID NO: 6025 - protein, 20 aa, Artificial Sequence
  Cyclic GFR-binding peptide
  MOD_RES (14)..(15): Xaa is C or S
IFLVSIPSLQTPAXXPKPVT

SEQ ID NO: 6026 - protein, 14 aa, Artificial Sequence
  Cyclic GFR-binding peptide
  MOD_RES (14)..(14): Xaa is C or S
YYVIPLPELDQSVX

SEQ ID NO: 6027 - protein, 13 aa, Artificial Sequence
  Cyclic GFR-binding peptide
YYVMPLPELETPV

SEQ ID NO: 6028 - protein, 18 aa, Artificial Sequence
  Cyclic GFR-binding peptide
  MOD_RES (14)..(15): Xaa is C or S
IYLVSIPSLKTPVXXAKG

SEQ ID NO: 6029 - protein, 17 aa, Artificial Sequence
  Cyclic GFR-binding peptide
  MOD_RES (14)..(15): Xaa is C or S
YYLITLPELDQPVXXPS

SEQ ID NO: 6030 - protein, 18 aa, Artificial Sequence
  Cyclic GFR-binding peptide
TPVGMDDIYLVSIPSLKT

SEQ ID NO: 6031 - protein, 18 aa, Artificial Sequence
  Cyclic GFR-binding peptide
  MOD_RES (14)..(15): Xaa is C or S
IFLISIPSLAQPVXXPAA

SEQ ID NO: 6032 - protein, 15 aa, Artificial Sequence
  Cyclic GFR-binding peptide
  MOD_RES (14)..(15): Xaa is C or S
YYVMPLPELETPVXX

SEQ ID NO: 6033 - protein, 27 aa, Artificial Sequence
  Cyclic GFR-binding peptide
  MOD_RES (21)..(21): Xaa is C or S
IVNSSDDIFLVSIPSLKTPAXTPKTVH

SEQ ID NO: 6034 - protein, 20 aa, Artificial Sequence
  Cyclic GFR-binding peptide
  MOD_RES (14)..(15): Xaa is C or S
IYLVSIPSLQTPAXXPKPVT

SEQ ID NO: 6035 - protein, 20 aa, Artificial Sequence
  Cyclic GFR-binding peptide
  MOD_RES (14)..(15): Xaa is C or S
IYLMSIPSTKVPAXXTSPVR

SEQ ID NO: 6036 - protein, 13 aa, Artificial Sequence
  Cyclic GFR-binding peptide
IFLVSIPSLQTPA

SEQ ID NO: 6037 - protein, 20 aa, Artificial Sequence
  Cyclic GFR-binding peptide
  MOD_RES (14)..(15): Xaa is C or S
YYLITLPELDQPVXXPSASA

SEQ ID NO: 6038 - protein, 18 aa, Artificial Sequence
  Cyclic GFR-binding peptide
IKPTKGIIFLISIPSLDQ

SEQ ID NO: 6039 - protein, 16 aa, Artificial Sequence
  Cyclic GFR-binding peptide
VVKDYEDYYLMTLPEL

SEQ ID NO: 6040 - protein, 14 aa, Artificial Sequence
  Cyclic GFR-binding peptide
  MOD_RES (14)..(14): Xaa is C or S
IYLVSIPSLKTPVX

SEQ ID NO: 6041 - protein, 16 aa, Artificial Sequence
  Cyclic GFR-binding peptide
VVKENEDYYVMPLPEL

SEQ ID NO: 6042 - protein, 16 aa, Artificial Sequence
  Cyclic GFR-binding peptide
VVKDYEDIFLMSIPSL

SEQ ID NO: 6043 - protein, 17 aa, Artificial Sequence
  Cyclic GFR-binding peptide
IVNSSDDYYVVPLPELQ

SEQ ID NO: 6044 - protein, 13 aa, Artificial Sequence
  Cyclic GFR-binding peptide
YYVIPLPELDQSV

SEQ ID NO: 6045 - protein, 17 aa, Artificial Sequence
  Cyclic GFR-binding peptide
IKPTKGIYYVIPLPELD

SEQ ID NO: 6046 - protein, 16 aa, Artificial Sequence
  Cyclic GFR-binding peptide
VKPTRGVYYLITLPEL

SEQ ID NO: 6047 - protein, 27 aa, Artificial Sequence
  Cyclic GFR-binding peptide
  MOD_RES (21)..(22): Xaa is C or S
VKPKRGVIFLISIPSLAQPVXXPAASA

SEQ ID NO: 6048 - protein, 16 aa, Artificial Sequence
  Cyclic GFR-binding peptide
  MOD_RES (14)..(15): Xaa is C or S
YYLITLPELDQSVXXP

SEQ ID NO: 6049 - protein, 17 aa, Artificial Sequence
  Cyclic GFR-binding peptide
IVNSSDDYYVVPLPELK

SEQ ID NO: 6050 - protein, 19 aa, Artificial Sequence
  Cyclic GFR-binding peptide
  MOD_RES (14)..(15): Xaa is C or S
YYLVTLPELQTPAXXPKPV

SEQ ID NO: 6051 - protein, 14 aa, Artificial Sequence
  Cyclic GFR-binding peptide
  MOD_RES (14)..(14): Xaa is C or S
YYLMTLPELETPVX

SEQ ID NO: 6052 - protein, 15 aa, Artificial Sequence
  Cyclic GFR-binding peptide
IKPTKGIYYVIPLPE

SEQ ID NO: 6053 - protein, 27 aa, Artificial Sequence
  Cyclic GFR-binding peptide
  MOD_RES (21)..(22): Xaa is C or S
VVNNASDYYVIPLPELRTPVXXTPPTS

SEQ ID NO: 6054 - protein, 20 aa, Artificial Sequence
  Cyclic GFR-binding peptide
  MOD_RES (14)..(15): Xaa is C or S
IYLVSIPSLKTPAXXAKPVA

SEQ ID NO: 6055 - protein, 15 aa, Artificial Sequence
  Cyclic GFR-binding peptide
  MOD_RES (14)..(15): Xaa is C or S
YYVIPLPELRTPVXX

SEQ ID NO: 6056 - protein, 27 aa, Artificial Sequence
  Cyclic GFR-binding peptide
  MOD_RES (21)..(22): Xaa is C or S
VKPTRGVYYVIPLPELDQPVXXPSASA

SEQ ID NO: 6057 - protein, 20 aa, Artificial Sequence
  Cyclic GFR-binding peptide
  MOD_RES (14)..(15): Xaa is C or S
YYLVTLPELKTPAXXPKPVY

SEQ ID NO: 6058 - protein, 14 aa, Artificial Sequence
  Cyclic GFR-binding peptide
  MOD_RES (14)..(14): Xaa is C or S
YYVMPLPELETPVX

SEQ ID NO: 6059 - protein, 27 aa, Artificial Sequence
  Cyclic GFR-binding peptide
  MOD_RES (21)..(22): Xaa is C or S
IVNSSDDIYLVSIPSLKTPAXXPKPVH

SEQ ID NO: 6060 - protein, 19 aa, Artificial Sequence
  Cyclic GFR-binding peptide
VVKDYEDYYLMTLPELETP

SEQ ID NO: 6061 - protein, 19 aa, Artificial Sequence
  Cyclic GFR-binding peptide
VKPTRGVYYLITLPELDQP

SEQ ID NO: 6062 - protein, 17 aa, Artificial Sequence
  Cyclic GFR-binding peptide
  MOD_RES (14)..(15): Xaa is C or S
YYVIPLPELDQPVXXPS

SEQ ID NO: 6063 - protein, 18 aa, Artificial Sequence
  Cyclic GFR-binding peptide
VVNNAADIYLISIPSLRA

SEQ ID NO: 6064 - protein, 13 aa, Artificial Sequence
  Cyclic GFR-binding peptide
IFLISIPSLAQPV

SEQ ID NO: 6065 - protein, 18 aa, Artificial Sequence
  Cyclic GFR-binding peptide
IKPTKGIYYLITLPELDQ

SEQ ID NO: 6066 - protein, 27 aa, Artificial Sequence
  Cyclic GFR-binding peptide
  MOD_RES (21)..(22): Xaa is C or S
VVKENEDYYLMTLPELETPVXXAKPIK

SEQ ID NO: 6067 - protein, 16 aa, Artificial Sequence
  Cyclic GFR-binding peptide
  MOD_RES (14)..(15): Xaa is C or S
YYVIPLPELDQSVXXP

SEQ ID NO: 6068 - protein, 16 aa, Artificial Sequence
  Cyclic GFR-binding peptide
  MOD_RES (14)..(15): Xaa is C or S
IYLMSIPSMKTPTXXP

SEQ ID NO: 6069 - protein, 16 aa, Artificial Sequence
  Cyclic GFR-binding peptide
IVNNSSDIYLVSIPSL

SEQ ID NO: 6070 - protein, 18 aa, Artificial Sequence
  Cyclic GFR-binding peptide
VVNNASDIFLISIPSLRT

SEQ ID NO: 6071 - protein, 20 aa, Artificial Sequence
  Cyclic GFR-binding peptide
  MOD_RES (14)..(15): Xaa is C or S
YYLMTLPELETPVXXAKPIS

SEQ ID NO: 6072 - protein, 18 aa, Artificial Sequence
  Cyclic GFR-binding peptide
  MOD_RES (14)..(15): Xaa is C or S
IYLISIPSLRTPVXXTPP

SEQ ID NO: 6073 - protein, 15 aa, Artificial Sequence
  Cyclic GFR-binding peptide
  MOD_RES (14)..(15): Xaa is C or S
IYLISIPSLRTPVXX

SEQ ID NO: 6074 - protein, 19 aa, Artificial Sequence
  Cyclic GFR-binding peptide
IIQQKDNIYLMSIPSMKTP

SEQ ID NO: 6075 - protein, 17 aa, Artificial Sequence
  Cyclic GFR-binding peptide
VKPKRGVIFLISIPSLA

SEQ ID NO: 6076 - protein, 17 aa, Artificial Sequence
  Cyclic GFR-binding peptide
YTVVGKDIYLISIPSLK

SEQ ID NO: 6077 - protein, 15 aa, Artificial Sequence
  Cyclic GFR-binding peptide
  MOD_RES (14)..(15): Xaa is C or S
YYVIPLPELDQSVXX

SEQ ID NO: 6078 - protein, 18 aa, Artificial Sequence
  Cyclic GFR-binding peptide
VVNNASDYYLITLPELRT

SEQ ID NO: 6079 - protein, 27 aa, Artificial Sequence
  Cyclic GFR-binding peptide
  MOD_RES (21)..(22): Xaa is C or S
VKPKRGVYYVIPLPELAQPVXXPAASA

SEQ ID NO: 6080 - protein, 20 aa, Artificial Sequence
  Cyclic GFR-binding peptide
  MOD_RES (14)..(15): Xaa is C or S
YYLVTLPELQTPAXXPKPVT

SEQ ID NO: 6081 - protein, 18 aa, Artificial Sequence
  Cyclic GFR-binding peptide
VKPTRGVYYVIPLPELDQ

SEQ ID NO: 6082 - protein, 19 aa, Artificial Sequence
  Cyclic GFR-binding peptide
VKPTRGVIFLISIPSLDQP

SEQ ID NO: 6083 - protein, 27 aa, Artificial Sequence
  Cyclic GFR-binding peptide
  MOD_RES (21)..(22): Xaa is C or S
IVNSSDDIFLVSIPSLKTPAXXPKPVY

SEQ ID NO: 6084 - protein, 16 aa, Artificial Sequence
  Cyclic GFR-binding peptide
IVNSSDDIYLVSIPSL

SEQ ID NO: 6085 - protein, 14 aa, Artificial Sequence
  Cyclic GFR-binding peptide
  MOD_RES (14)..(14): Xaa is C or S
IFLVSIPSLKTPAX

SEQ ID NO: 6086 - protein, 13 aa, Artificial Sequence
  Cyclic GFR-binding peptide
IYLISIPSLRTPV

SEQ ID NO: 6087 - protein, 16 aa, Artificial Sequence
  Cyclic GFR-binding peptide
YTVVGKDIYLISIPSL

SEQ ID NO: 6088 - protein, 27 aa, Artificial Sequence
  Cyclic GFR-binding peptide
  MOD_RES (21)..(21): Xaa is C or S
IVNSSDDYYVVPLPELKTPAXTPKTVH

SEQ ID NO: 6089 - protein, 17 aa, Artificial Sequence
  Cyclic GFR-binding peptide
IVNNSSDIYLVSIPSLK

SEQ ID NO: 6090 - protein, 16 aa, Artificial Sequence
  Cyclic GFR-binding peptide
VVKENEDIFLMSIPSL

SEQ ID NO: 6091 - protein, 17 aa, Artificial Sequence
  Cyclic GFR-binding peptide
IVNSSDDIYLVSIPSLK

SEQ ID NO: 6092 - protein, 15 aa, Artificial Sequence
  Cyclic GFR-binding peptide
  MOD_RES (14)..(15): Xaa is C or S
YYLITLPELRTPVXX

SEQ ID NO: 6093 - protein, 16 aa, Artificial Sequence
  Cyclic GFR-binding peptide
  MOD_RES (14)..(15): Xaa is C or S
IFLVSIPSLQTPAXXP

SEQ ID NO: 6094 - protein, 17 aa, Artificial Sequence
  Cyclic GFR-binding peptide
IVNSSDDIYLVSIPSLQ

SEQ ID NO: 6095 - protein, 27 aa, Artificial Sequence
  Cyclic GFR-binding peptide
  MOD_RES (21)..(22): Xaa is C or S
LLVRGNDIYLMSIPSTKVPAXXTSPVR

SEQ ID NO: 6096 - protein, 20 aa, Artificial Sequence
  Cyclic GFR-binding peptide
  MOD_RES (14)..(15): Xaa is C or S
IYLVSIPSLKTPVXXAKGVK

SEQ ID NO: 6097 - protein, 19 aa, Artificial Sequence
  Cyclic GFR-binding peptide
  MOD_RES (14)..(15): Xaa is C or S
IFLVSIPSLKTPAXXPKPV

SEQ ID NO: 6098 - protein, 15 aa, Artificial Sequence
  Cyclic GFR-binding peptide
  MOD_RES (14)..(15): Xaa is C or S
IFLISIPSLDQPVXX

SEQ ID NO: 6099 - protein, 19 aa, Artificial Sequence
  Cyclic GFR-binding peptide
  MOD_RES (14)..(15): Xaa is C or S
YYLITLPELAQPVXXPAAS

SEQ ID NO: 6100 - protein, 16 aa, Artificial Sequence
  Cyclic GFR-binding peptide
IVNSSDDYYVVPLPEL

SEQ ID NO: 6101 - protein, 14 aa, Artificial Sequence
  Cyclic GFR-binding peptide
  MOD_RES (14)..(14): Xaa is C or S
IFLISIPSLDQPVX

SEQ ID NO: 6102 - protein, 15 aa, Artificial Sequence
  Cyclic GFR-binding peptide
  MOD_RES (14)..(14): Xaa is C or S
IYLVSIPSLKTPAXT

SEQ ID NO: 6103 - protein, 19 aa, Artificial Sequence
  Cyclic GFR-binding peptide
  MOD_RES (14)..(15): Xaa is C or S
YYVIPLPELRTPVXXTPPT

SEQ ID NO: 6104 - protein, 19 aa, Artificial Sequence
  Cyclic GFR-binding peptide
VKPKRGVIFLISIPSLAQP

SEQ ID NO: 6105 - protein, 17 aa, Artificial Sequence
  Cyclic GFR-binding peptide
VVKDYEDYYLMTLPELE

SEQ ID NO: 6106 - protein, 17 aa, Artificial Sequence
  Cyclic GFR-binding peptide
  MOD_RES (14)..(15): Xaa is C or S
YYLITLPELRTPVXXTP

SEQ ID NO: 6107 - protein, 16 aa, Artificial Sequence
  Cyclic GFR-binding peptide
VVNNASDYYLITLPEL

SEQ ID NO: 6108 - protein, 15 aa, Artificial Sequence
  Cyclic GFR-binding peptide
  MOD_RES (14)..(15): Xaa is C or S
IYLMSIPSLETPVXX

SEQ ID NO: 6109 - protein, 15 aa, Artificial Sequence
  Cyclic GFR-binding peptide
  MOD_RES (14)..(15): Xaa is C or S
IFLVSIPSLKTPAXX

SEQ ID NO: 6110 - protein, 17 aa, Artificial Sequence
  Cyclic GFR-binding peptide
  MOD_RES (14)..(15): Xaa is C or S
YYLITLPELDQSVXXPS

SEQ ID NO: 6111 - protein, 20 aa, Artificial Sequence
  Cyclic GFR-binding peptide
  MOD_RES (14)..(15): Xaa is C or S
IYLISIPSLRTPVXXTPPTS

SEQ ID NO: 6112 - protein, 19 aa, Artificial Sequence
  Cyclic GFR-binding peptide
YTVVGKDIYLISIPSLKTP

SEQ ID NO: 6113 - protein, 15 aa, Artificial Sequence
  Cyclic GFR-binding peptide
VKPKRGVYYVIPLPE

SEQ ID NO: 6114 - protein, 18 aa, Artificial Sequence
  Cyclic GFR-binding peptide
  MOD_RES (14)..(15): Xaa is C or S
YYVIPLPELRTPVXXTPP

SEQ ID NO: 6115 - protein, 19 aa, Artificial Sequence
  Cyclic GFR-binding peptide
VVNNASDYYVIPLPELRTP

SEQ ID NO: 6116 - protein, 14 aa, Artificial Sequence
  Cyclic GFR-binding peptide
  MOD_RES (14)..(14): Xaa is C or S
IYLMSIPSLETPVX

SEQ ID NO: 6117 - protein, 18 aa, Artificial Sequence
  Cyclic GFR-binding peptide
  MOD_RES (14)..(15): Xaa is C or S
IFLVSIPSLKTPAXXPKP

SEQ ID NO: 6118 - protein, 13 aa, Artificial Sequence
  Cyclic GFR-binding peptide
IYLMSIPSTKVPA

SEQ ID NO: 6119 - protein, 17 aa, Artificial Sequence
  Cyclic GFR-binding peptide
VVNNASDIYLISIPSLR

SEQ ID NO: 6120 - protein, 18 aa, Artificial Sequence
  Cyclic GFR-binding peptide
  MOD_RES (14)..(15): Xaa is C or S
IFLVSIPSLQTPAXXPKP

SEQ ID NO: 6121 - protein, 15 aa, Artificial Sequence
  Cyclic GFR-binding peptide
  MOD_RES (14)..(15): Xaa is C or S
IFLVSIPSLQTPAXX

SEQ ID NO: 6122 - protein, 15 aa, Artificial Sequence
  Cyclic GFR-binding peptide
VVKENEDYYLMTLPE

SEQ ID NO: 6123 - protein, 19 aa, Artificial Sequence
  Cyclic GFR-binding peptide
  MOD_RES (14)..(14): Xaa is C or S
IFLVSIPSLKTPAXTPKTV

SEQ ID NO: 6124 - protein, 15 aa, Artificial Sequence
  Cyclic GFR-binding peptide
VVNNASDYYVIPLPE

SEQ ID NO: 6125 - protein, 18 aa, Artificial Sequence
  Cyclic GFR-binding peptide
  MOD_RES (14)..(15): Xaa is C or S
IYLISIPSLKTPVXXAKS

SEQ ID NO: 6126 - protein, 18 aa, Artificial Sequence
  Cyclic GFR-binding peptide
IVNSSDDYYLVTLPELQT

SEQ ID NO: 6127 - protein, 18 aa, Artificial Sequence
  Cyclic GFR-binding peptide
  MOD_RES (14)..(14): Xaa is C or S
IFLVSIPSLKTPAXTPKT

SEQ ID NO: 6128 - protein, 19 aa, Artificial Sequence
  Cyclic GFR-binding peptide
LLVRGNDIYLMSIPSTKVP

SEQ ID NO: 6129 - protein, 19 aa, Artificial Sequence
  Cyclic GFR-binding peptide
  MOD_RES (14)..(15): Xaa is C or S
YYVMPLPELETPVXXAKPI

SEQ ID NO: 6130 - protein, 19 aa, Artificial Sequence
  Cyclic GFR-binding peptide
VVKENEDIFLMSIPSLETP

SEQ ID NO: 6131 - protein, 18 aa, Artificial Sequence
  Cyclic GFR-binding peptide
IVNSSDDYYLVTLPELKT

SEQ ID NO: 6132 - protein, 13 aa, Artificial Sequence
  Cyclic GFR-binding peptide
YYVIPLPELRTPV

SEQ ID NO: 6133 - protein, 19 aa, Artificial Sequence
  Cyclic GFR-binding peptide
IVNNSSDIYLVSIPSLKTP

SEQ ID NO: 6134 - protein, 20 aa, Artificial Sequence
  Cyclic GFR-binding peptide
  MOD_RES (14)..(15): Xaa is C or S
IFLMSIPSLETPVXXAKPIK

SEQ ID NO: 6135 - protein, 16 aa, Artificial Sequence
  Cyclic GFR-binding peptide
VKPKRGVYYLITLPEL

SEQ ID NO: 6136 - protein, 15 aa, Artificial Sequence
  Cyclic GFR-binding peptide
  MOD_RES (14)..(14): Xaa is C or S
YYLVTLPELKTPAXT

SEQ ID NO: 6137 - protein, 17 aa, Artificial Sequence
  Cyclic GFR-binding peptide
VKPTRGVIFLISIPSLD

SEQ ID NO: 6138 - protein, 17 aa, Artificial Sequence
  Cyclic GFR-binding peptide
IIQQKDNIYLMSIPSMK

SEQ ID NO: 6139 - protein, 15 aa, Artificial Sequence
  Cyclic GFR-binding peptide
VVKDYEDIYLMSIPS

SEQ ID NO: 6140 - protein, 19 aa, Artificial Sequence
  Cyclic GFR-binding peptide
  MOD_RES (14)..(15): Xaa is C or S
YYVIPLPELDQSVXXPSAS

SEQ ID NO: 6141 - protein, 16 aa, Artificial Sequence
  Cyclic GFR-binding peptide
IIQQKDNIYLMSIPSM

SEQ ID NO: 6142 - protein, 17 aa, Artificial Sequence
  Cyclic GFR-binding peptide
  MOD_RES (14)..(15): Xaa is C or S
IYLISIPSLRTPVXXTP

SEQ ID NO: 6143 - protein, 18 aa, Artificial Sequence
  Cyclic GFR-binding peptide
VVKDYEDYYVMPLPELET

SEQ ID NO: 6144 - protein, 27 aa, Artificial Sequence
  Cyclic GFR-binding peptide
  MOD_RES (21)..(22): Xaa is C or S
IVNSSDDYYLVTLPELQTPAXXPKPVT

SEQ ID NO: 6145 - protein, 18 aa, Artificial Sequence
  Cyclic GFR-binding peptide
  MOD_RES (14)..(15): Xaa is C or S
IFLISIPSLDQSVXXPSA

SEQ ID NO: 6146 - protein, 17 aa, Artificial Sequence
  Cyclic GFR-binding peptide
  MOD_RES (14)..(15): Xaa is C or S
IFLVSIPSLQTPAXXPK

SEQ ID NO: 6147 - protein, 20 aa, Artificial Sequence
  Cyclic GFR-binding peptide
  MOD_RES (14)..(15): Xaa is C or S
YYVVPLPELKTPAXXPKPVY

SEQ ID NO: 6148 - protein, 19 aa, Artificial Sequence
  Cyclic GFR-binding peptide
  MOD_RES (14)..(15): Xaa is C or S
IYLMSIPSMKTPTXXPGAS

SEQ ID NO: 6149 - protein, 27 aa, Artificial Sequence
  Cyclic GFR-binding peptide
  MOD_RES (21)..(22): Xaa is C or S
VVKENEDIFLMSIPSLETPVXXAKPIK

SEQ ID NO: 6150 - protein, 15 aa, Artificial Sequence
  Cyclic GFR-binding peptide
IVNSSDDIYLVSIPS

SEQ ID NO: 6151 - protein, 18 aa, Artificial Sequence
  Cyclic GFR-binding peptide
VKPKRGVYYVIPLPELAQ

SEQ ID NO: 6152 - protein, 20 aa, Artificial Sequence
  Cyclic GFR-binding peptide
  MOD_RES (14)..(15): Xaa is C or S
YYLITLPELRTPVXXTPPTS

SEQ ID NO: 6153 - protein, 17 aa, Artificial Sequence
  Cyclic GFR-binding peptide
VVKENEDIFLMSIPSLE

SEQ ID NO: 6154 - protein, 20 aa, Artificial Sequence
  Cyclic GFR-binding peptide
  MOD_RES (14)..(15): Xaa is C or S
IYLISIPSLKTPVXXAKSAK

SEQ ID NO: 6155 - protein, 14 aa, Artificial Sequence
  Cyclic GFR-binding peptide
  MOD_RES (14)..(14): Xaa is C or S
IYLISIPSLRTPVX

SEQ ID NO: 6156 - protein, 15 aa, Artificial Sequence
  Cyclic GFR-binding peptide
  MOD_RES (14)..(15): Xaa is C or S
IYLVSIPSLKTPAXX

SEQ ID NO: 6157 - protein, 19 aa, Artificial Sequence
  Cyclic GFR-binding peptide
IKPTKGIYYVIPLPELDQS

SEQ ID NO: 6158 - protein, 16 aa, Artificial Sequence
  Cyclic GFR-binding peptide
  MOD_RES (14)..(15): Xaa is C or S
IYLVSIPSLKTPAXXP

SEQ ID NO: 6159 - protein, 17 aa, Artificial Sequence
  Cyclic GFR-binding peptide
VVNNAADIYLISIPSLR

SEQ ID NO: 6160 - protein, 18 aa, Artificial Sequence
  Cyclic GFR-binding peptide
  MOD_RES (14)..(15): Xaa is C or S
YYLVTLPELKTPAXXPKP

SEQ ID NO: 6161 - protein, 18 aa, Artificial Sequence
  Cyclic GFR-binding peptide
  MOD_RES (14)..(15): Xaa is C or S
YYVMPLPELETPVXXAKP

SEQ ID NO: 6162 - protein, 19 aa, Artificial Sequence
  Cyclic GFR-binding peptide
VVNNAADIYLISIPSLRAP

SEQ ID NO: 6163 - protein, 19 aa, Artificial Sequence
  Cyclic GFR-binding peptide
  MOD_RES (14)..(15): Xaa is C or S
IYLMSIPSLETPVXXAKPI

SEQ ID NO: 6164 - protein, 18 aa, Artificial Sequence
  Cyclic GFR-binding peptide
VVKENEDYYVMPLPELET

SEQ ID NO: 6165 - protein, 18 aa, Artificial Sequence
  Cyclic GFR-binding peptide
  MOD_RES (14)..(15): Xaa is C or S
YYVIPLPELDQSVXXPSA

SEQ ID NO: 6166 - protein, 17 aa, Artificial Sequence
  Cyclic GFR-binding peptide
VVKENEDYYLMTLPELE

SEQ ID NO: 6167 - protein, 14 aa, Artificial Sequence
  Cyclic GFR-binding peptide
  MOD_RES (14)..(14): Xaa is C or S
IYLVSIPSLQTPAX

SEQ ID NO: 6168 - protein, 17 aa, Artificial Sequence
  Cyclic GFR-binding peptide
VKPTRGVYYLITLPELD

SEQ ID NO: 6169 - protein, 20 aa, Artificial Sequence
  Cyclic GFR-binding peptide
  MOD_RES (14)..(15): Xaa is C or S
IFLISIPSLAQPVXXPAASA

SEQ ID NO: 6170 - protein, 17 aa, Artificial Sequence
  Cyclic GFR-binding peptide
VVKENEDIYLMSIPSLE

SEQ ID NO: 6171 - protein, 15 aa, Artificial Sequence
  Cyclic GFR-binding peptide
IVNSSDDIFLVSIPS

SEQ ID NO: 6172 - protein, 16 aa, Artificial Sequence
  Cyclic GFR-binding peptide
  MOD_RES (14)..(15): Xaa is C or S
IYLMSIPSLETPVXXA

SEQ ID NO: 6173 - protein, 15 aa, Artificial Sequence
  Cyclic GFR-binding peptide
  MOD_RES (14)..(15): Xaa is C or S
IYLVSIPSLKTPVXX

SEQ ID NO: 6174 - protein, 13 aa, Artificial Sequence
  Cyclic GFR-binding peptide
YYLITLPELAQPV

SEQ ID NO: 6175 - protein, 15 aa, Artificial Sequence
  Cyclic GFR-binding peptide
TPVGMDDIYLVSIPS

SEQ ID NO: 6176 - protein, 17 aa, Artificial Sequence
  Cyclic GFR-binding peptide
  MOD_RES (14)..(15): Xaa is C or S
YYVIPLPELRTPVXXTP

SEQ ID NO: 6177 - protein, 18 aa, Artificial Sequence
  Cyclic GFR-binding peptide
VVKDYEDIYLMSIPSLET

SEQ ID NO: 6178 - protein, 15 aa, Artificial Sequence
  Cyclic GFR-binding peptide
VKPTRGVYYVIPLPE

SEQ ID NO: 6179 - protein, 13 aa, Artificial Sequence
  Cyclic GFR-binding peptide
YYLVTLPELQTPA

SEQ ID NO: 6180 - protein, 15 aa, Artificial Sequence
  Cyclic GFR-binding peptide
VVKDYEDYYVMPLPE

SEQ ID NO: 6181 - protein, 18 aa, Artificial Sequence
  Cyclic GFR-binding peptide
VVKDYEDIFLMSIPSLET

SEQ ID NO: 6182 - protein, 18 aa, Artificial Sequence
  Cyclic GFR-binding peptide
  MOD_RES (14)..(15): Xaa is C or S
YYLITLPELRTPVXXTPP

SEQ ID NO: 6183 - protein, 13 aa, Artificial Sequence
  Cyclic GFR-binding peptide
IYLMSIPSLETPV

SEQ ID NO: 6184 - protein, 15 aa, Artificial Sequence
  Cyclic GFR-binding peptide
VVNNASDIFLISIPS

SEQ ID NO: 6185 - protein, 27 aa, Artificial Sequence
  Cyclic GFR-binding peptide
  MOD_RES (21)..(22): Xaa is C or S
VVKDYEDIYLMSIPSLETPVXXAKPIS

SEQ ID NO: 6186 - protein, 18 aa, Artificial Sequence
  Cyclic GFR-binding peptide
  MOD_RES (14)..(15): Xaa is C or S
YYVVPLPELKTPAXXPKP

SEQ ID NO: 6187 - protein, 16 aa, Artificial Sequence
  Cyclic GFR-binding peptide
VVNNASDYYVIPLPEL

SEQ ID NO: 6188 - protein, 20 aa, Artificial Sequence
  Cyclic GFR-binding peptide
  MOD_RES (14)..(15): Xaa is C or S
IYLMSIPSLETPVXXAKPIS

SEQ ID NO: 6189 - protein, 13 aa, Artificial Sequence
  Cyclic GFR-binding peptide
IYLVSIPSLKTPV

SEQ ID NO: 6190 - protein, 18 aa, Artificial Sequence
  Cyclic GFR-binding peptide
IVNNSSDIYLVSIPSLKT

SEQ ID NO: 6191 - protein, 19 aa, Artificial Sequence
  Cyclic GFR-binding peptide
  MOD_RES (14)..(15): Xaa is C or S
IYLVSIPSLKTPAXXAKPV

SEQ ID NO: 6192 - protein, 13 aa, Artificial Sequence
  Cyclic GFR-binding peptide
YYLITLPELRTPV

SEQ ID NO: 6193 - protein, 20 aa, Artificial Sequence
  Cyclic GFR-binding peptide
  MOD_RES (14)..(15): Xaa is C or S
IFLISIPSLDQPVXXPSASA

SEQ ID NO: 6194 - protein, 17 aa, Artificial Sequence
  Cyclic GFR-binding peptide
  MOD_RES (14)..(15): Xaa is C or S
IFLVSIPSLKTPAXXPK

SEQ ID NO: 6195 - protein, 15 aa, Artificial Sequence
  Cyclic GFR-binding peptide
VVNNASDIYLISIPS

SEQ ID NO: 6196 - protein, 16 aa, Artificial Sequence
  Cyclic GFR-binding peptide
  MOD_RES (14)..(15): Xaa is C or S
IYLISIPSLKTPVXXA

SEQ ID NO: 6197 - protein, 19 aa, Artificial Sequence
  Cyclic GFR-binding peptide
VVKDYEDYYVMPLPELETP

SEQ ID NO: 6198 - protein, 15 aa, Artificial Sequence
  Cyclic GFR-binding peptide
IVNSSDDYYLVTLPE

SEQ ID NO: 6199 - protein, 27 aa, Artificial Sequence
  Cyclic GFR-binding peptide
  MOD_RES (21)..(22): Xaa is C or S
IKPTKGIYYVIPLPELDQSVXXPSASA

SEQ ID NO: 6200 - protein, 16 aa, Artificial Sequence
  Cyclic GFR-binding peptide
  MOD_RES (14)..(15): Xaa is C or S
YYLITLPELAQPVXXP

SEQ ID NO: 6201 - protein, 20 aa, Artificial Sequence
  Cyclic GFR-binding peptide
  MOD_RES (14)..(15): Xaa is C or S
IYLVSIPSLKTPAXXPKPVY

SEQ ID NO: 6202 - protein, 18 aa, Artificial Sequence
  Cyclic GFR-binding peptide
YTVVGKDIYLISIPSLKT

SEQ ID NO: 6203 - protein, 17 aa, Artificial Sequence
  Cyclic GFR-binding peptide
IVNSSDDIFLVSIPSLQ

SEQ ID NO: 6204 - protein, 15 aa, Artificial Sequence
  Cyclic GFR-binding peptide
VVKENEDIYLMSIPS

SEQ ID NO: 6205 - protein, 16 aa, Artificial Sequence
  Cyclic GFR-binding peptide
VVKENEDIYLMSIPSL

SEQ ID NO: 6206 - protein, 13 aa, Artificial Sequence
  Cyclic GFR-binding peptide
IYLMSIPSMKTPT

SEQ ID NO: 6207 - protein, 17 aa, Artificial Sequence
  Cyclic GFR-binding peptide
IVNSSDDIFLVSIPSLK

SEQ ID NO: 6208 - protein, 19 aa, Artificial Sequence
  Cyclic GFR-binding peptide
  MOD_RES (14)..(15): Xaa is C or S
YYLITLPELDQSVXXPSAS

SEQ ID NO: 6209 - protein, 27 aa, Artificial Sequence
  Cyclic GFR-binding peptide
  MOD_RES (21)..(22): Xaa is C or S
VVKDYEDIFLMSIPSLETPVXXAKPIS

SEQ ID NO: 6210 - protein, 18 aa, Artificial Sequence
  Cyclic GFR-binding peptide
  MOD_RES (14)..(15): Xaa is C or S
YYLMTLPELETPVXXAKP

SEQ ID NO: 6211 - protein, 18 aa, Artificial Sequence
  Cyclic GFR-binding peptide
  MOD_RES (14)..(15): Xaa is C or S
YYLITLPELDQPVXXPSA

SEQ ID NO: 6212 - protein, 17 aa, Artificial Sequence
  Cyclic GFR-binding peptide
  MOD_RES (14)..(15): Xaa is C or S
IFLMSIPSLETPVXXAK

SEQ ID NO: 6213 - protein, 19 aa, Artificial Sequence
  Cyclic GFR-binding peptide
  MOD_RES (14)..(15): Xaa is C or S
IYLISIPSLKTPVXXAKSA

SEQ ID NO: 6214 - protein, 17 aa, Artificial Sequence
  Cyclic GFR-binding peptide
  MOD_RES (14)..(15): Xaa is C or S
IFLISIPSLAQPVXXPA

SEQ ID NO: 6215 - protein, 27 aa, Artificial Sequence
  Cyclic GFR-binding peptide
  MOD_RES (21)..(22): Xaa is C or S
YTVVGKDIYLISIPSLKTPVXXAKSAK

SEQ ID NO: 6216 - protein, 16 aa, Artificial Sequence
  Cyclic GFR-binding peptide
VVKENEDYYLMTLPEL

SEQ ID NO: 6217 - protein, 19 aa, Artificial Sequence
  Cyclic GFR-binding peptide
  MOD_RES (14)..(15): Xaa is C or S
IYLVSIPSLQTPAXXPKPV

SEQ ID NO: 6218 - protein, 15 aa, Artificial Sequence
  Cyclic GFR-binding peptide
IKPTKGIYYLITLPE

SEQ ID NO: 6219 - protein, 20 aa, Artificial Sequence
  Cyclic GFR-binding peptide
  MOD_RES (14)..(15): Xaa is C or S
YYVIPLPELDQPVXXPSASA

SEQ ID NO: 6220 - protein, 17 aa, Artificial Sequence
  Cyclic GFR-binding peptide
  MOD_RES (14)..(15): Xaa is C or S
YYVVPLPELKTPAXXPK

SEQ ID NO: 6221 - protein, 16 aa, Artificial Sequence
  Cyclic GFR-binding peptide
  MOD_RES (14)..(15): Xaa is C or S
IYLVSIPSLKTPAXXA

SEQ ID NO: 6222 - protein, 19 aa, Artificial Sequence
  Cyclic GFR-binding peptide
  MOD_RES (14)..(15): Xaa is C or S
IYLVSIPSLKTPAXXPKPV

SEQ ID NO: 6223 - protein, 17 aa, Artificial Sequence
  Cyclic GFR-binding peptide
  MOD_RES (14)..(15): Xaa is C or S
IYLVSIPSLKTPVXXAK

SEQ ID NO: 6224 - protein, 16 aa, Artificial Sequence
  Cyclic GFR-binding peptide
  MOD_RES (14)..(14): Xaa is C or S
IYLVSIPSLKTPAXTP

SEQ ID NO: 6225 - protein, 19 aa, Artificial Sequence
  Cyclic GFR-binding peptide
IVNSSDDIYLVSIPSLKTP

SEQ ID NO: 6226 - protein, 13 aa, Artificial Sequence
  Cyclic GFR-binding peptide
YYLITLPELDQSV

SEQ ID NO: 6227 - protein, 19 aa, Artificial Sequence
  Cyclic GFR-binding peptide
IVNSSDDIFLVSIPSLKTP

SEQ ID NO: 6228 - protein, 19 aa, Artificial Sequence
  Cyclic GFR-binding peptide
  MOD_RES (14)..(15): Xaa is C or S
YYLITLPELRTPVXXTPPT

SEQ ID NO: 6229 - protein, 20 aa, Artificial Sequence
  Cyclic GFR-binding peptide
  MOD_RES (14)..(15): Xaa is C or S
YYVIPLPELRTPVXXTPPTS

SEQ ID NO: 6230 - protein, 16 aa, Artificial Sequence
  Cyclic GFR-binding peptide
LLVRGNDIYLMSIPST

SEQ ID NO: 6231 - protein, 16 aa, Artificial Sequence
  Cyclic GFR-binding peptide
TPVGMDDIYLVSIPSL

SEQ ID NO: 6232 - protein, 19 aa, Artificial Sequence
  Cyclic GFR-binding peptide
  MOD_RES (14)..(15): Xaa is C or S
IYLMSIPSTKVPAXXTSPV

SEQ ID NO: 6233 - protein, 19 aa, Artificial Sequence
  Cyclic GFR-binding peptide
IVNSSDDIYLVSIPSLQTP

SEQ ID NO: 6234 - protein, 15 aa, Artificial Sequence
  Cyclic GFR-binding peptide
IIQQKDNIYLMSIPS

SEQ ID NO: 6235 - protein, 19 aa, Artificial Sequence
  Cyclic GFR-binding peptide
IVNSSDDIFLVSIPSLQTP

SEQ ID NO: 6236 - protein, 27 aa, Artificial Sequence
  Cyclic GFR-binding peptide
  MOD_RES (21)..(22): Xaa is C or S
IIQQKDNIYLMSIPSMKTPTXXPGASG

SEQ ID NO: 6237 - protein, 18 aa, Artificial Sequence
  Cyclic GFR-binding peptide
  MOD_RES (14)..(15): Xaa is C or S
IFLMSIPSLETPVXXAKP

SEQ ID NO: 6238 - protein, 15 aa, Artificial Sequence
  Cyclic GFR-binding peptide
VVKENEDIFLMSIPS

SEQ ID NO: 6239 - protein, 17 aa, Artificial Sequence
  Cyclic GFR-binding peptide
TPVGMDDIYLVSIPSLK

SEQ ID NO: 6240 - protein, 17 aa, Artificial Sequence
  Cyclic GFR-binding peptide
  MOD_RES (14)..(14): Xaa is C or S
IYLVSIPSLKTPAXTPK

SEQ ID NO: 6241 - protein, 17 aa, Artificial Sequence
  Cyclic GFR-binding peptide
  MOD_RES (14)..(15): Xaa is C or S
YYVMPLPELETPVXXAK

SEQ ID NO: 6242 - protein, 16 aa, Artificial Sequence
  Cyclic GFR-binding peptide
VVKDYEDIYLMSIPSL

SEQ ID NO: 6243 - protein, 19 aa, Artificial Sequence
  Cyclic GFR-binding peptide
TPVGMDDIYLVSIPSLKTP

SEQ ID NO: 6244 - protein, 15 aa, Artificial Sequence
  Cyclic GFR-binding peptide
  MOD_RES (14)..(15): Xaa is C or S
YYVVPLPELQTPAXX

SEQ ID NO: 6245 - protein, 27 aa, Artificial Sequence
  Cyclic GFR-binding peptide
  MOD_RES (21)..(22): Xaa is C or S
IVNSSDDYYVVPLPELKTPAXXPKPVY

SEQ ID NO: 6246 - protein, 18 aa, Artificial Sequence
  Cyclic GFR-binding peptide
  MOD_RES (14)..(15): Xaa is C or S
IYLMSIPSTKVPAXXTSP

SEQ ID NO: 6247 - protein, 17 aa, Artificial Sequence
  Cyclic GFR-binding peptide
  MOD_RES (14)..(15): Xaa is C or S
YYLVTLPELKTPAXXPK

SEQ ID NO: 6248 - protein, 16 aa, Artificial Sequence
  Cyclic GFR-binding peptide
  MOD_RES (14)..(15): Xaa is C or S
IYLVSIPSLQTPAXXP

SEQ ID NO: 6249 - protein, 27 aa, Artificial Sequence
  Cyclic GFR-binding peptide
  MOD_RES (21)..(22): Xaa is C or S
VKPKRGVYYLITLPELAQPVXXPAASA

SEQ ID NO: 6250 - protein, 15 aa, Artificial Sequence
  Cyclic GFR-binding peptide
  MOD_RES (14)..(15): Xaa is C or S
YYLITLPELDQSVXX

SEQ ID NO: 6251 - protein, 15 aa, Artificial Sequence
  Cyclic GFR-binding peptide
  MOD_RES (14)..(15): Xaa is C or S
IYLISIPSLKTPVXX

SEQ ID NO: 6252 - protein, 20 aa, Artificial Sequence
  Cyclic GFR-binding peptide
  MOD_RES (14)..(15): Xaa is C or S
YYLITLPELAQPVXXPAASA

SEQ ID NO: 6253 - protein, 19 aa, Artificial Sequence
  Cyclic GFR-binding peptide
  MOD_RES (14)..(15): Xaa is C or S
IFLISIPSLDQSVXXPSAS

SEQ ID NO: 6254 - protein, 14 aa, Artificial Sequence
  Cyclic GFR-binding peptide
  MOD_RES (14)..(14): Xaa is C or S
YYVIPLPELDQPVX

SEQ ID NO: 6255 - protein, 16 aa, Artificial Sequence
  Cyclic GFR-binding peptide
VKPTRGVIFLISIPSL

SEQ ID NO: 6256 - protein, 27 aa, Artificial Sequence
  Cyclic GFR-binding peptide
  MOD_RES (21)..(22): Xaa is C or S
IVNSSDDYYVVPLPELQTPAXXPKPVT

SEQ ID NO: 6257 - protein, 18 aa, Artificial Sequence
  Cyclic GFR-binding peptide
  MOD_RES (14)..(15): Xaa is C or S
YYLVTLPELQTPAXXPKP

SEQ ID NO: 6258 - protein, 15 aa, Artificial Sequence
  Cyclic GFR-binding peptide
  MOD_RES (14)..(15): Xaa is C or S
IFLMSIPSLETPVXX

SEQ ID NO: 6259 - protein, 20 aa, Artificial Sequence
  Cyclic GFR-binding peptide
  MOD_RES (14)..(15): Xaa is C or S
YYVVPLPELQTPAXXPKPVT

SEQ ID NO: 6260 - protein, 19 aa, Artificial Sequence
  Cyclic GFR-binding peptide
VKPKRGVYYVIPLPELAQP

SEQ ID NO: 6261 - protein, 16 aa, Artificial Sequence
  Cyclic GFR-binding peptide
  MOD_RES (14)..(15): Xaa is C or S
YYVVPLPELQTPAXXP

SEQ ID NO: 6262 - protein, 15 aa, Artificial Sequence
  Cyclic GFR-binding peptide
  MOD_RES (14)..(15): Xaa is C or S
IYLMSIPSMKTPTXX

SEQ ID NO: 6263 - protein, 16 aa, Artificial Sequence
  Cyclic GFR-binding peptide
IVNSSDDIFLVSIPSL

SEQ ID NO: 6264 - protein, 19 aa, Artificial Sequence
  Cyclic GFR-binding peptide
VVKENEDYYVMPLPELETP

SEQ ID NO: 6265 - protein, 15 aa, Artificial Sequence
  Cyclic GFR-binding peptide
VKPKRGVIFLISIPS

SEQ ID NO: 6266 - protein, 14 aa, Artificial Sequence
  Cyclic GFR-binding peptide
  MOD_RES (14)..(14): Xaa is C or S
IYLVSIPSLKTPAX

SEQ ID NO: 6267 - protein, 17 aa, Artificial Sequence
  Cyclic GFR-binding peptide
VKPKRGVYYLITLPELA

SEQ ID NO: 6268 - protein, 18 aa, Artificial Sequence
  Cyclic GFR-binding peptide
  MOD_RES (14)..(15): Xaa is C or S
IYLVSIPSLQTPAXXPKP

SEQ ID NO: 6269 - protein, 19 aa, Artificial Sequence
  Cyclic GFR-binding peptide
IVNSSDDYYLVTLPELKTP

SEQ ID NO: 6270 - protein, 18 aa, Artificial Sequence
  Cyclic GFR-binding peptide
  MOD_RES (14)..(15): Xaa is C or S
YYLITLPELAQPVXXPAA

SEQ ID NO: 6271 - protein, 27 aa, Artificial Sequence
  Cyclic GFR-binding peptide
  MOD_RES (21)..(22): Xaa is C or S
IKPTKGIYYLITLPELDQSVXXPSASA

SEQ ID NO: 6272 - protein, 13 aa, Artificial Sequence
  Cyclic GFR-binding peptide
IYLVSIPSLQTPA

SEQ ID NO: 6273 - protein, 19 aa, Artificial Sequence
  Cyclic GFR-binding peptide
IVNSSDDYYLVTLPELQTP

SEQ ID NO: 6274 - protein, 15 aa, Artificial Sequence
  Cyclic GFR-binding peptide
VVNNAADIYLISIPS

SEQ ID NO: 6275 - protein, 13 aa, Artificial Sequence
  Cyclic GFR-binding peptide
IYLISIPSLKTPV

SEQ ID NO: 6276 - protein, 19 aa, Artificial Sequence
  Cyclic GFR-binding peptide
  MOD_RES (14)..(15): Xaa is C or S
YYVVPLPELQTPAXXPKPV

SEQ ID NO: 6277 - protein, 19 aa, Artificial Sequence
  Cyclic GFR-binding peptide
VVKENEDIYLMSIPSLETP

SEQ ID NO: 6278 - protein, 27 aa, Artificial Sequence
  Cyclic GFR-binding peptide
  MOD_RES (21)..(22): Xaa is C or S
VKPTRGVIFLISIPSLDQPVXXPSASA

SEQ ID NO: 6279 - protein, 15 aa, Artificial Sequence
  Cyclic GFR-binding peptide
  MOD_RES (14)..(15): Xaa is C or S
YYLVTLPELQTPAXX

SEQ ID NO: 6280 - protein, 27 aa, Artificial Sequence
  Cyclic GFR-binding peptide
  MOD_RES (21)..(22): Xaa is C or S
VKPTRGVYYLITLPELDQPVXXPSASA

SEQ ID NO: 6281 - protein, 18 aa, Artificial Sequence
  Cyclic GFR-binding peptide
LLVRGNDIYLMSIPSTKV

SEQ ID NO: 6282 - protein, 27 aa, Artificial Sequence
  Cyclic GFR-binding peptide
  MOD_RES (21)..(22): Xaa is C or S
VVKENEDYYVMPLPELETPVXXAKPIK

SEQ ID NO: 6283 - protein, 17 aa, Artificial Sequence
  Cyclic GFR-binding peptide
  MOD_RES (14)..(15): Xaa is C or S
IYLVSIPSLKTPAXXAK

SEQ ID NO: 6284 - protein, 17 aa, Artificial Sequence
  Cyclic GFR-binding peptide
  MOD_RES (14)..(15): Xaa is C or S
IFLISIPSLDQPVXXPS

SEQ ID NO: 6285 - protein, 15 aa, Artificial Sequence
  Cyclic GFR-binding peptide
  MOD_RES (14)..(15): Xaa is C or S
IYLVSIPSLQTPAXX

SEQ ID NO: 6286 - protein, 18 aa, Artificial Sequence
  Cyclic GFR-binding peptide
IKPTKGIYYVIPLPELDQ

SEQ ID NO: 6287 - protein, 27 aa, Artificial Sequence
  Cyclic GFR-binding peptide
  MOD_RES (21)..(22): Xaa is C or S
IVNSSDDIYLVSIPSLKTPAXXPKPVY

SEQ ID NO: 6288 - protein, 14 aa, Artificial Sequence
  Cyclic GFR-binding peptide
  MOD_RES (14)..(14): Xaa is C or S
YYLITLPELDQPVX

SEQ ID NO: 6289 - protein, 19 aa, Artificial Sequence
  Cyclic GFR-binding peptide
  MOD_RES (14)..(14): Xaa is C or S
IYLVSIPSLKTPAXTPKTV

SEQ ID NO: 6290 - protein, 16 aa, Artificial Sequence
  Cyclic GFR-binding peptide
  MOD_RES (14)..(15): Xaa is C or S
IFLISIPSLAQPVXXP

SEQ ID NO: 6291 - protein, 16 aa, Artificial Sequence
  Cyclic GFR-binding peptide
  MOD_RES (14)..(15): Xaa is C or S
IYLISIPSLRTPVXXT

SEQ ID NO: 6292 - protein, 15 aa, Artificial Sequence
  Cyclic GFR-binding peptide
VKPKRGVYYLITLPE

SEQ ID NO: 6293 - protein, 27 aa, Artificial Sequence
  Cyclic GFR-binding peptide
  MOD_RES (21)..(22): Xaa is C or S
IVNSSDDIYLVSIPSLQTPAXXPKPVT

SEQ ID NO: 6294 - protein, 18 aa, Artificial Sequence
  Cyclic GFR-binding peptide
  MOD_RES (14)..(15): Xaa is C or S
YYVIPLPELDQPVXXPSA

SEQ ID NO: 6295 - protein, 18 aa, Artificial Sequence
  Cyclic GFR-binding peptide
  MOD_RES (14)..(14): Xaa is C or S
IYLVSIPSLKTPAXTPKT

SEQ ID NO: 6296 - protein, 17 aa, Artificial Sequence
  Cyclic GFR-binding peptide
VVKDYEDIYLMSIPSLE

SEQ ID NO: 6297 - protein, 18 aa, Artificial Sequence
  Cyclic GFR-binding peptide
  MOD_RES (14)..(15): Xaa is C or S
IYLVSIPSLKTPAXXAKP

SEQ ID NO: 6298 - protein, 19 aa, Artificial Sequence
  Cyclic GFR-binding peptide
VKPTRGVYYVIPLPELDQP

SEQ ID NO: 6299 - protein, 20 aa, Artificial Sequence
  Cyclic GFR-binding peptide
  MOD_RES (14)..(15): Xaa is C or S
IYLMSIPSLETPVXXAKPIK

SEQ ID NO: 6300 - protein, 18 aa, Artificial Sequence
  Cyclic GFR-binding peptide
  MOD_RES (14)..(15): Xaa is C or S
IYLMSIPSMKTPTXXPGA

SEQ ID NO: 6301 - protein, 16 aa, Artificial Sequence
  Cyclic GFR-binding peptide
  MOD_RES (14)..(15): Xaa is C or S
IYLVSIPSLKTPVXXA

SEQ ID NO: 6302 - protein, 17 aa, Artificial Sequence
  Cyclic GFR-binding peptide
VVNNASDYYLITLPELR

SEQ ID NO: 6303 - protein, 19 aa, Artificial Sequence
  Cyclic GFR-binding peptide
  MOD_RES (14)..(15): Xaa is C or S
YYLITLPELDQPVXXPSAS

SEQ ID NO: 6304 - protein, 17 aa, Artificial Sequence
  Cyclic GFR-binding peptide
VVNNASDIFLISIPSLR

SEQ ID NO: 6305 - protein, 15 aa, Artificial Sequence
  Cyclic GFR-binding peptide
LLVRGNDIYLMSIPS

SEQ ID NO: 6306 - protein, 27 aa, Artificial Sequence
  Cyclic GFR-binding peptide
  MOD_RES (21)..(22): Xaa is C or S
IVNNSSDIYLVSIPSLKTPAXXAKPVA

SEQ ID NO: 6307 - protein, 18 aa, Artificial Sequence
  Cyclic GFR-binding peptide
  MOD_RES (14)..(15): Xaa is C or S
YYLITLPELDQSVXXPSA

SEQ ID NO: 6308 - protein, 18 aa, Artificial Sequence
  Cyclic GFR-binding peptide
  MOD_RES (14)..(14): Xaa is C or S
YYVVPLPELKTPAXTPKT

SEQ ID NO: 6309 - protein, 18 aa, Artificial Sequence
  Cyclic GFR-binding peptide
VVNNASDYYVIPLPELRT

SEQ ID NO: 6310 - protein, 17 aa, Artificial Sequence
  Cyclic GFR-binding peptide
  MOD_RES (14)..(15): Xaa is C or S
IYLVSIPSLKTPAXXPK

SEQ ID NO: 6311 - protein, 16 aa, Artificial Sequence
  Cyclic GFR-binding peptide
VVKDYEDYYVMPLPEL

SEQ ID NO: 6312 - protein, 15 aa, Artificial Sequence
  Cyclic GFR-binding peptide
  MOD_RES (14)..(15): Xaa is C or S
YYLITLPELAQPVXX

SEQ ID NO: 6313 - protein, 17 aa, Artificial Sequence
  Cyclic GFR-binding peptide
  MOD_RES (14)..(15): Xaa is C or S
IYLVSIPSLQTPAXXPK

SEQ ID NO: 6314 - protein, 15 aa, Artificial Sequence
  Cyclic GFR-binding peptide
IVNSSDDYYVVPLPE

SEQ ID NO: 6315 - protein, 13 aa, Artificial Sequence
  Cyclic GFR-binding peptide
YYLVTLPELKTPA

SEQ ID NO: 6316 - protein, 20 aa, Artificial Sequence
  Cyclic GFR-binding peptide
  MOD_RES (14)..(15): Xaa is C or S
YYVMPLPELETPVXXAKPIK

SEQ ID NO: 6317 - protein, 14 aa, Artificial Sequence
  Cyclic GFR-binding peptide
  MOD_RES (14)..(14): Xaa is C or S
YYLITLPELAQPVX

SEQ ID NO: 6318 - protein, 17 aa, Artificial Sequence
  Cyclic GFR-binding peptide
  MOD_RES (14)..(15): Xaa is C or S
IFLISIPSLDQSVXXPS

SEQ ID NO: 6319 - protein, 27 aa, Artificial Sequence
  Cyclic GFR-binding peptide
  MOD_RES (21)..(21): Xaa is C or S
IVNSSDDYYLVTLPELKTPAXTPKTVH

SEQ ID NO: 6320 - protein, 17 aa, Artificial Sequence
  Cyclic GFR-binding peptide
IKPTKGIYYLITLPELD

SEQ ID NO: 6321 - protein, 27 aa, Artificial Sequence
  Cyclic GFR-binding peptide
  MOD_RES (21)..(22): Xaa is C or S
VVNNAADIYLISIPSLRAPVXXSAPAA

SEQ ID NO: 6322 - protein, 19 aa, Artificial Sequence
  Cyclic GFR-binding peptide
  MOD_RES (14)..(15): Xaa is C or S
IYLVSIPSLKTPVXXAKGV

SEQ ID NO: 6323 - protein, 16 aa, Artificial Sequence
  Cyclic GFR-binding peptide
  MOD_RES (14)..(15): Xaa is C or S
IYLMSIPSTKVPAXXT

SEQ ID NO: 6324 - protein, 27 aa, Artificial Sequence
  Cyclic GFR-binding peptide
  MOD_RES (21)..(22): Xaa is C or S
TPVGMDDIYLVSIPSLKTPVXXAKGVK

SEQ ID NO: 6325 - protein, 27 aa, Artificial Sequence
  Cyclic GFR-binding peptide
  MOD_RES (21)..(22): Xaa is C or S
VVNNASDYYLITLPELRTPVXXTPPTS

SEQ ID NO: 6326 - protein, 27 aa, Artificial Sequence
  Cyclic GFR-binding peptide
  MOD_RES (21)..(22): Xaa is C or S
VVKENEDIYLMSIPSLETPVXXAKPIK

SEQ ID NO: 6327 - protein, 18 aa, Artificial Sequence
  Cyclic GFR-binding peptide
  MOD_RES (14)..(15): Xaa is C or S
IYLVSIPSLKTPAXXPKP

SEQ ID NO: 6328 - protein, 16 aa, Artificial Sequence
  Cyclic GFR-binding peptide
IKPTKGIYYVIPLPEL

SEQ ID NO: 6329 - protein, 15 aa, Artificial Sequence
  Cyclic GFR-binding peptide
  MOD_RES (14)..(15): Xaa is C or S
YYLVTLPELKTPAXX

SEQ ID NO: 6330 - protein, 19 aa, Artificial Sequence
  Cyclic GFR-binding peptide
VVNNASDYYLITLPELRTP

SEQ ID NO: 6331 - protein, 18 aa, Artificial Sequence
  Cyclic GFR-binding peptide
VVNNASDIYLISIPSLRT

SEQ ID NO: 6332 - protein, 16 aa, Artificial Sequence
  Cyclic GFR-binding peptide
VKPKRGVYYVIPLPEL

SEQ ID NO: 6333 - protein, 18 aa, Artificial Sequence
  Cyclic GFR-binding peptide
IIQQKDNIYLMSIPSMKT

SEQ ID NO: 6334 - protein, 20 aa, Artificial Sequence
  Cyclic GFR-binding peptide
  MOD_RES (14)..(14): Xaa is C or S
YYLVTLPELKTPAXTPKTVH

SEQ ID NO: 6335 - protein, 20 aa, Artificial Sequence
  Cyclic GFR-binding peptide
  MOD_RES (14)..(14): Xaa is C or S
IYLVSIPSLKTPAXTPKTVH

SEQ ID NO: 6336 - protein, 13 aa, Artificial Sequence
  Cyclic GFR-binding peptide
IYLVSIPSLKTPA

SEQ ID NO: 6337 - protein, 18 aa, Artificial Sequence
  Cyclic GFR-binding peptide
IVNSSDDYYVVPLPELKT

SEQ ID NO: 6338 - protein, 15 aa, Artificial Sequence
  Cyclic GFR-binding peptide
IKPTKGIIFLISIPS

SEQ ID NO: 6339 - protein, 14 aa, Artificial Sequence
  Cyclic GFR-binding peptide
  MOD_RES (14)..(14): Xaa is C or S
YYVVPLPELKTPAX

SEQ ID NO: 6340 - protein, 13 aa, Artificial Sequence
  Cyclic GFR-binding peptide
YYLITLPELDQPV

SEQ ID NO: 6341 - protein, 18 aa, Artificial Sequence
  Cyclic GFR-binding peptide
VVKDYEDYYLMTLPELET

SEQ ID NO: 6342 - protein, 16 aa, Artificial Sequence
  Cyclic GFR-binding peptide
  MOD_RES (14)..(15): Xaa is C or S
YYVIPLPELRTPVXXT

SEQ ID NO: 6343 - protein, 18 aa, Artificial Sequence
  Cyclic GFR-binding peptide
  MOD_RES (14)..(15): Xaa is C or S
YYVVPLPELQTPAXXPKP

SEQ ID NO: 6344 - protein, 15 aa, Artificial Sequence
  Cyclic GFR-binding peptide
VVNNASDYYLITLPE

SEQ ID NO: 6345 - protein, 16 aa, Artificial Sequence
  Cyclic GFR-binding peptide
IVNSSDDYYLVTLPEL

SEQ ID NO: 6346 - protein, 16 aa, Artificial Sequence
  Cyclic GFR-binding peptide
  MOD_RES (14)..(15): Xaa is C or S
YYLVTLPELQTPAXXP

SEQ ID NO: 6347 - protein, 17 aa, Artificial Sequence
  Cyclic GFR-binding peptide
IVNSSDDYYLVTLPELK

SEQ ID NO: 6348 - protein, 18 aa, Artificial Sequence
  Cyclic GFR-binding peptide
IVNSSDDYYVVPLPELQT

SEQ ID NO: 6349 - protein, 17 aa, Artificial Sequence
  Cyclic GFR-binding peptide
VVKDYEDYYVMPLPELE

SEQ ID NO: 6350 - protein, 19 aa, Artificial Sequence
  Cyclic GFR-binding peptide
  MOD_RES (14)..(14): Xaa is C or S
YYVVPLPELKTPAXTPKTV

SEQ ID NO: 6351 - protein, 13 aa, Artificial Sequence
  Cyclic GFR-binding peptide
YYVVPLPELQTPA

SEQ ID NO: 6352 - protein, 17 aa, Artificial Sequence
  Cyclic GFR-binding peptide
  MOD_RES (14)..(15): Xaa is C or S
IYLISIPSLKTPVXXAK

SEQ ID NO: 6353 - protein, 16 aa, Artificial Sequence
  Cyclic GFR-binding peptide
  MOD_RES (14)..(15): Xaa is C or S
IFLISIPSLDQSVXXP

SEQ ID NO: 6354 - protein, 16 aa, Artificial Sequence
  Cyclic GFR-binding peptide
  MOD_RES (14)..(15): Xaa is C or S
YYVMPLPELETPVXXA

SEQ ID NO: 6355 - protein, 17 aa, Artificial Sequence
  Cyclic GFR-binding peptide
  MOD_RES (14)..(15): Xaa is C or S
IYLMSIPSTKVPAXXTS

SEQ ID NO: 6356 - protein, 17 aa, Artificial Sequence
  Cyclic GFR-binding peptide
IVNSSDDYYLVTLPELQ

SEQ ID NO: 6357 - protein, 14 aa, Artificial Sequence
  Cyclic GFR-binding peptide
  MOD_RES (14)..(14): Xaa is C or S
IYLMSIPSMKTPTX

SEQ ID NO: 6358 - protein, 27 aa, Artificial Sequence
  Cyclic GFR-binding peptide
  MOD_RES (21)..(22): Xaa is C or S
VVKDYEDYYLMTLPELETPVXXAKPIS

SEQ ID NO: 6359 - protein, 18 aa, Artificial Sequence
  Cyclic GFR-binding peptide
VKPTRGVIFLISIPSLDQ

SEQ ID NO: 6360 - protein, 14 aa, Artificial Sequence
  Cyclic GFR-binding peptide
  MOD_RES (14)..(14): Xaa is C or S
IFLMSIPSLETPVX

SEQ ID NO: 6361 - protein, 13 aa, Artificial Sequence
  Cyclic GFR-binding peptide
APTKLSPISVLFI

SEQ ID NO: 6362 - protein, 14 aa, Artificial Sequence
  Cyclic GFR-binding peptide
  MOD_RES (1)..(1): Xaa is C or S
XVPQALSPISILFI

SEQ ID NO: 6363 - protein, 20 aa, Artificial Sequence
  Cyclic GFR-binding peptide
  MOD_RES (7)..(7): Xaa is C or S
HVTKPTXAPTKLSPISVLFI

SEQ ID NO: 6364 - protein, 27 aa, Artificial Sequence
  Cyclic GFR-binding peptide
  MOD_RES (6)..(7): Xaa is C or S
SIPKAXXVPTELEPLPMVYYDEYDKVV

SEQ ID NO: 6365 - protein, 13 aa, Artificial Sequence
  Cyclic GFR-binding peptide
VPQDLEPLPIVYY

SEQ ID NO: 6366 - protein, 19 aa, Artificial Sequence
  Cyclic GFR-binding peptide
  MOD_RES (5)..(6): Xaa is C or S
VPKPXXAPTKLEPLTVLYY

SEQ ID NO: 6367 - protein, 17 aa, Artificial Sequence
  Cyclic GFR-binding peptide
RLEPLPIVYYDSANNVV

SEQ ID NO: 6368 - protein, 15 aa, Artificial Sequence
  Cyclic GFR-binding peptide
SPISILFIVGRTPKV

SEQ ID NO: 6369 - protein, 17 aa, Artificial Sequence
  Cyclic GFR-binding peptide
  MOD_RES (3)..(4): Xaa is C or S
KPXXAPTQLEPLTVLYY

SEQ ID NO: 6370 - protein, 18 aa, Artificial Sequence
  Cyclic GFR-binding peptide
  MOD_RES (5)..(5): Xaa is C or S
TKPTXAPTKLEPLTVLYY

SEQ ID NO: 6371 - protein, 16 aa, Artificial Sequence
  Cyclic GFR-binding peptide
  MOD_RES (2)..(3): Xaa is C or S
PXXAPTKLEPLPVVYY

SEQ ID NO: 6372 - protein, 15 aa, Artificial Sequence
  Cyclic GFR-binding peptide
SPISMLFIDEYDKVV

SEQ ID NO: 6373 - protein, 16 aa, Artificial Sequence
  Cyclic GFR-binding peptide
  MOD_RES (3)..(3): Xaa is C or S
PTXAPTKLEPLTVLYY

SEQ ID NO: 6374 - protein, 19 aa, Artificial Sequence
  Cyclic GFR-binding peptide
  MOD_RES (5)..(6): Xaa is C or S
SASPXXVPQDLSPISILFI

SEQ ID NO: 6375 - protein, 20 aa, Artificial Sequence
  Cyclic GFR-binding peptide
  MOD_RES (6)..(7): Xaa is C or S
GSAGPXXTPTKMSPISMLYI

SEQ ID NO: 6376 - protein, 20 aa, Artificial Sequence
  Cyclic GFR-binding peptide
  MOD_RES (6)..(7): Xaa is C or S
YVPKPXXAPTKLSPISVLFI

SEQ ID NO: 6377 - protein, 16 aa, Artificial Sequence
  Cyclic GFR-binding peptide
  MOD_RES (2)..(3): Xaa is C or S
AXXVPTELSPISMLFI

SEQ ID NO: 6378 - protein, 20 aa, Artificial Sequence
  Cyclic GFR-binding peptide
  MOD_RES (6)..(7): Xaa is C or S
SIPKAXXVPTELSPISMLFI

SEQ ID NO: 6379 - protein, 15 aa, Artificial Sequence
  Cyclic GFR-binding peptide
  MOD_RES (1)..(2): Xaa is C or S
XXAPVKTSPISMLYI

SEQ ID NO: 6380 - protein, 13 aa, Artificial Sequence
  Cyclic GFR-binding peptide
VPTELEPLTMLYY

SEQ ID NO: 6381 - protein, 19 aa, Artificial Sequence
  Cyclic GFR-binding peptide
  MOD_RES (5)..(6): Xaa is C or S
VPKPXXAPTKLEPLPVVYY

SEQ ID NO: 6382 - protein, 15 aa, Artificial Sequence
  Cyclic GFR-binding peptide
  MOD_RES (1)..(2): Xaa is C or S
XXVPTELEPLTMLYY

SEQ ID NO: 6383 - protein, 14 aa, Artificial Sequence
  Cyclic GFR-binding peptide
  MOD_RES (1)..(1): Xaa is C or S
XVPTKLSPISILYI

SEQ ID NO: 6384 - protein, 18 aa, Artificial Sequence
  Cyclic GFR-binding peptide
  MOD_RES (4)..(5): Xaa is C or S
PKAXXVPTELSPISMLYI

SEQ ID NO: 6385 - protein, 15 aa, Artificial Sequence
  Cyclic GFR-binding peptide
  MOD_RES (1)..(2): Xaa is C or S
XXVSQDLSPISILFI

SEQ ID NO: 6386 - protein, 16 aa, Artificial Sequence
  Cyclic GFR-binding peptide
  MOD_RES (2)..(3): Xaa is C or S
PXXVPQDLEPLPIVYY

SEQ ID NO: 6387 - protein, 18 aa, Artificial Sequence
  Cyclic GFR-binding peptide
TKLSPISVLFIDDSSNVI

SEQ ID NO: 6388 - protein, 17 aa, Artificial Sequence
  Cyclic GFR-binding peptide
  MOD_RES (4)..(4): Xaa is C or S
KPTXAPTKLSPISVLFI

SEQ ID NO: 6389 - protein, 20 aa, Artificial Sequence
  Cyclic GFR-binding peptide
  MOD_RES (6)..(7): Xaa is C or S
ASASPXXVSQDLEPLPIVYY

SEQ ID NO: 6390 - protein, 17 aa, Artificial Sequence
  Cyclic GFR-binding peptide
  MOD_RES (3)..(4): Xaa is C or S
KPXXAPTQLEPLPVVYY

SEQ ID NO: 6391 - protein, 17 aa, Artificial Sequence
  Cyclic GFR-binding peptide
DLEPLPIVYYVGRTPKV

SEQ ID NO: 6392 - protein, 14 aa, Artificial Sequence
  Cyclic GFR-binding peptide
  MOD_RES (1)..(1): Xaa is C or S
XAPTQLEPLPVVYY

SEQ ID NO: 6393 - protein, 18 aa, Artificial Sequence
  Cyclic GFR-binding peptide
TELEPLTMLYYDENEKVV

SEQ ID NO: 6394 - protein, 16 aa, Artificial Sequence
  Cyclic GFR-binding peptide
LSPISILFIIGKTPKI

SEQ ID NO: 6395 - protein, 17 aa, Artificial Sequence
  Cyclic GFR-binding peptide
  MOD_RES (4)..(4): Xaa is C or S
KPTXAPTKLEPLPVVYY

SEQ ID NO: 6396 - protein, 18 aa, Artificial Sequence
  Cyclic GFR-binding peptide
TQLSPISVLFIDDSSNVI

SEQ ID NO: 6397 - protein, 19 aa, Artificial Sequence
  Cyclic GFR-binding peptide
PTRLSPISILYIDSANNVV

SEQ ID NO: 6398 - protein, 19 aa, Artificial Sequence
  Cyclic GFR-binding peptide
  MOD_RES (5)..(6): Xaa is C or S
IPKAXXVPTELSPISMLFI

SEQ ID NO: 6399 - protein, 18 aa, Artificial Sequence
  Cyclic GFR-binding peptide
TELSPISMLFIDENEKVV

SEQ ID NO: 6400 - protein, 16 aa, Artificial Sequence
  Cyclic GFR-binding peptide
  MOD_RES (3)..(3): Xaa is C or S
PTXAPTKLEPLPVVYY

SEQ ID NO: 6401 - protein, 17 aa, Artificial Sequence
  Cyclic GFR-binding peptide
  MOD_RES (3)..(4): Xaa is C or S
SPXXVSQDLEPLPIVYY

SEQ ID NO: 6402 - protein, 16 aa, Artificial Sequence
  Cyclic GFR-binding peptide
  MOD_RES (2)..(3): Xaa is C or S
PXXAPTKLEPLTVLYY

SEQ ID NO: 6403 - protein, 19 aa, Artificial Sequence
  Cyclic GFR-binding peptide
PTKLEPLPVVYYDDSSNVI

SEQ ID NO: 6404 - protein, 15 aa, Artificial Sequence
  Cyclic GFR-binding peptide
EPLPMVYYDENEKVV

SEQ ID NO: 6405 - protein, 19 aa, Artificial Sequence
  Cyclic GFR-binding peptide
  MOD_RES (5)..(6): Xaa is C or S
SAAPXXVPQALSPISILFI

SEQ ID NO: 6406 - protein, 14 aa, Artificial Sequence
  Cyclic GFR-binding peptide
  MOD_RES (1)..(1): Xaa is C or S
XVPTRLEPLPIVYY

SEQ ID NO: 6407 - protein, 19 aa, Artificial Sequence
  Cyclic GFR-binding peptide
PTQLEPLPVVYYDDSSNVI

SEQ ID NO: 6408 - protein, 20 aa, Artificial Sequence
  Cyclic GFR-binding peptide
  MOD_RES (6)..(7): Xaa is C or S
KIPKAXXVPTELEPLTMLYY

SEQ ID NO: 6409 - protein, 15 aa, Artificial Sequence
  Cyclic GFR-binding peptide
EPLTMLYYDEYDKVV

SEQ ID NO: 6410 - protein, 15 aa, Artificial Sequence
  Cyclic GFR-binding peptide
  MOD_RES (1)..(2): Xaa is C or S
XXAPTKLEPLPVVYY

SEQ ID NO: 6411 - protein, 18 aa, Artificial Sequence
  Cyclic GFR-binding peptide
TQLSPISVLYIDDSSNVI

SEQ ID NO: 6412 - protein, 18 aa, Artificial Sequence
  Cyclic GFR-binding peptide
TKLSPISVLYIDDSSNVI

SEQ ID NO: 6413 - protein, 13 aa, Artificial Sequence
  Cyclic GFR-binding peptide
VPQDLSPISILFI

SEQ ID NO: 6414 - protein, 15 aa, Artificial Sequence
  Cyclic GFR-binding peptide
  MOD_RES (2)..(2): Xaa is C or S
TXAPTKLSPISVLFI

SEQ ID NO: 6415 - protein, 13 aa, Artificial Sequence
  Cyclic GFR-binding peptide
APTKLEPLPVVYY

SEQ ID NO: 6416 - protein, 13 aa, Artificial Sequence
  Cyclic GFR-binding peptide
VPTELSPISMLFI

SEQ ID NO: 6417 - protein, 17 aa, Artificial Sequence
  Cyclic GFR-binding peptide
ELSPISMLFIDEYDKVV

SEQ ID NO: 6418 - protein, 20 aa, Artificial Sequence
  Cyclic GFR-binding peptide
  MOD_RES (6)..(7): Xaa is C or S
SIPKAXXVPTELEPLPMVYY

SEQ ID NO: 6419 - protein, 16 aa, Artificial Sequence
  Cyclic GFR-binding peptide
  MOD_RES (2)..(3): Xaa is C or S
TXXVPTRLEPLTILYY

SEQ ID NO: 6420 - protein, 27 aa, Artificial Sequence
  Cyclic GFR-binding peptide
  MOD_RES (6)..(7): Xaa is C or S
TVPKPXXAPTQLSPISVLFIDDSSNVI

SEQ ID NO: 6421 - protein, 14 aa, Artificial Sequence
  Cyclic GFR-binding peptide
  MOD_RES (1)..(1): Xaa is C or S
XVPTRLEPLTILYY

SEQ ID NO: 6422 - protein, 14 aa, Artificial Sequence
  Cyclic GFR-binding peptide
  MOD_RES (1)..(1): Xaa is C or S
XAPTKLEPLTVLYY

SEQ ID NO: 6423 - protein, 16 aa, Artificial Sequence
  Cyclic GFR-binding peptide
  MOD_RES (3)..(3): Xaa is C or S
PTXAPTKLSPISVLFI

SEQ ID NO: 6424 - protein, 17 aa, Artificial Sequence
  Cyclic GFR-binding peptide
  MOD_RES (4)..(4): Xaa is C or S
KPTXAPTKLEPLTVLYY

SEQ ID NO: 6425 - protein, 14 aa, Artificial Sequence
  Cyclic GFR-binding peptide
  MOD_RES (1)..(1): Xaa is C or S
XVSQDLSPISILFI

SEQ ID NO: 6426 - protein, 19 aa, Artificial Sequence
  Cyclic GFR-binding peptide
PQALEPLTILYYVGRKPKV

SEQ ID NO: 6427 - protein, 17 aa, Artificial Sequence
  Cyclic GFR-binding peptide
ELEPLPMVYYDENEKVV

SEQ ID NO: 6428 - protein, 19 aa, Artificial Sequence
  Cyclic GFR-binding peptide
  MOD_RES (6)..(6): Xaa is C or S
VTKPTXAPTKLEPLTVLYY

SEQ ID NO: 6429 - protein, 17 aa, Artificial Sequence
  Cyclic GFR-binding peptide
  MOD_RES (3)..(4): Xaa is C or S
GPXXTPTKMSPISMLYI

SEQ ID NO: 6430 - protein, 14 aa, Artificial Sequence
  Cyclic GFR-binding peptide
  MOD_RES (1)..(1): Xaa is C or S
XAPVKTSPISMLYI

SEQ ID NO: 6431 - protein, 18 aa, Artificial Sequence
  Cyclic GFR-binding peptide
QALSPISILFIVGRKPKV

SEQ ID NO: 6432 - protein, 15 aa, Artificial Sequence
  Cyclic GFR-binding peptide
  MOD_RES (2)..(2): Xaa is C or S
TXAPTKLEPLPVVYY

SEQ ID NO: 6433 - protein, 16 aa, Artificial Sequence
  Cyclic GFR-binding peptide
  MOD_RES (2)..(3): Xaa is C or S
AXXVPTELEPLTMLYY

SEQ ID NO: 6434 - protein, 20 aa, Artificial Sequence
  Cyclic GFR-binding peptide
  MOD_RES (6)..(7): Xaa is C or S
ASASPXXVSQDLSPISILFI

SEQ ID NO: 6435 - protein, 18 aa, Artificial Sequence
  Cyclic GFR-binding peptide
QALEPLTILYYVGRKPKV

SEQ ID NO: 6436 - protein, 16 aa, Artificial Sequence
  Cyclic GFR-binding peptide
LEPLPIVYYVGRTPKV

SEQ ID NO: 6437 - protein, 14 aa, Artificial Sequence
  Cyclic GFR-binding peptide
  MOD_RES (1)..(1): Xaa is C or S
XAPTQLEPLTVLYY

SEQ ID NO: 6438 - protein, 15 aa, Artificial Sequence
  Cyclic GFR-binding peptide
  MOD_RES (1)..(2): Xaa is C or S
XXVPQDLEPLPIVYY

SEQ ID NO: 6439 - protein, 13 aa, Artificial Sequence
  Cyclic GFR-binding peptide
VSQDLSPISILFI

SEQ ID NO: 6440 - protein, 19 aa, Artificial Sequence
  Cyclic GFR-binding peptide
  MOD_RES (5)..(6): Xaa is C or S
TPPTXXVPTRLSPISILYI

SEQ ID NO: 6441 - protein, 18 aa, Artificial Sequence
  Cyclic GFR-binding peptide
  MOD_RES (4)..(5): Xaa is C or S
ASPXXVPQDLSPISILFI

SEQ ID NO: 6442 - protein, 17 aa, Artificial Sequence
  Cyclic GFR-binding peptide
KTSPISMLYIDNGRVLL

SEQ ID NO: 6443 - protein, 27 aa, Artificial Sequence
  Cyclic GFR-binding peptide
  MOD_RES (6)..(7): Xaa is C or S
STPPTXXVPTRLSPISILYIDSANNVV

SEQ ID NO: 6444 - protein, 20 aa, Artificial Sequence
  Cyclic GFR-binding peptide
  MOD_RES (7)..(7): Xaa is C or S
HVTKPTXAPTKLEPLPVVYY

SEQ ID NO: 6445 - protein, 16 aa, Artificial Sequence
  Cyclic GFR-binding peptide
LSPISILFIVGRKPKV

SEQ ID NO: 6446 - protein, 19 aa, Artificial Sequence
  Cyclic GFR-binding peptide
  MOD_RES (5)..(6): Xaa is C or S
IPKAXXVPTELEPLTMLYY

SEQ ID NO: 6447 - protein, 15 aa, Artificial Sequence
  Cyclic GFR-binding peptide
  MOD_RES (1)..(2): Xaa is C or S
XXVPQALSPISILFI

SEQ ID NO: 6448 - protein, 16 aa, Artificial Sequence
  Cyclic GFR-binding peptide
  MOD_RES (2)..(3): Xaa is C or S
PXXVPQDLSPISILFI

SEQ ID NO: 6449 - protein, 17 aa, Artificial Sequence
  Cyclic GFR-binding peptide
  MOD_RES (3)..(4): Xaa is C or S
KAXXVPTELEPLTMLYY

SEQ ID NO: 6450 - protein, 19 aa, Artificial Sequence
  Cyclic GFR-binding peptide
PTELEPLTMLYYDENEKVV

SEQ ID NO: 6451 - protein, 18 aa, Artificial Sequence
  Cyclic GFR-binding peptide
TELSPISMLYIDENEKVV

SEQ ID NO: 6452 - protein, 27 aa, Artificial Sequence
  Cyclic GFR-binding peptide
  MOD_RES (6)..(7): Xaa is C or S
ASASPXXVSQDLSPISILFIIGKTPKI

SEQ ID NO: 6453 - protein, 27 aa, Artificial Sequence
  Cyclic GFR-binding peptide
  MOD_RES (7)..(7): Xaa is C or S
HVTKPTXAPTKLSPISVLYIDDSSNVI

SEQ ID NO: 6454 - protein, 16 aa, Artificial Sequence
  Cyclic GFR-binding peptide
  MOD_RES (2)..(3): Xaa is C or S
PXXAPTKLSPISVLFI

SEQ ID NO: 6455 - protein, 15 aa, Artificial Sequence
  Cyclic GFR-binding peptide
SPISILYIDKGVVTY

SEQ ID NO: 6456 - protein, 17 aa, Artificial Sequence
  Cyclic GFR-binding peptide
  MOD_RES (3)..(4): Xaa is C or S
APXXVPQALEPLTILYY

SEQ ID NO: 6457 - protein, 20 aa, Artificial Sequence
  Cyclic GFR-binding peptide
  MOD_RES (6)..(7): Xaa is C or S
HVPKPXXAPTKLSPISVLYI

SEQ ID NO: 6458 - protein, 19 aa, Artificial Sequence
  Cyclic GFR-binding peptide
  MOD_RES (5)..(6): Xaa is C or S
SASPXXVPQDLEPLPIVYY

SEQ ID NO: 6459 - protein, 19 aa, Artificial Sequence
  Cyclic GFR-binding peptide
SQDLSPISILFIIGKTPKI

SEQ ID NO: 6460 - protein, 27 aa, Artificial Sequence
  Cyclic GFR-binding peptide
  MOD_RES (6)..(7): Xaa is C or S
YVPKPXXAPTKLEPLTVLYYDDSSNVI

SEQ ID NO: 6461 - protein, 17 aa, Artificial Sequence
  Cyclic GFR-binding peptide
  MOD_RES (3)..(4): Xaa is C or S
KAXXVPTELSPISMLYI

SEQ ID NO: 6462 - protein, 19 aa, Artificial Sequence
  Cyclic GFR-binding peptide
PTELSPISMLFIDEYDKVV

SEQ ID NO: 6463 - protein, 15 aa, Artificial Sequence
  Cyclic GFR-binding peptide
SPISVLYIDSSNNVI

SEQ ID NO: 6464 - protein, 19 aa, Artificial Sequence
  Cyclic GFR-binding peptide
PTELSPISMLYIDEYDKVV

SEQ ID NO: 6465 - protein, 14 aa, Artificial Sequence
  Cyclic GFR-binding peptide
  MOD_RES (1)..(1): Xaa is C or S
XAPTQLSPISVLFI

SEQ ID NO: 6466 - protein, 19 aa, Artificial Sequence
  Cyclic GFR-binding peptide
  MOD_RES (5)..(6): Xaa is C or S
VPKPXXAPTQLSPISVLFI

SEQ ID NO: 6467 - protein, 17 aa, Artificial Sequence
  Cyclic GFR-binding peptide
DLSPISILFIIGKTPKI

SEQ ID NO: 6468 - protein, 16 aa, Artificial Sequence
  Cyclic GFR-binding peptide
LSPISILYIDSANNVV

SEQ ID NO: 6469 - protein, 20 aa, Artificial Sequence
  Cyclic GFR-binding peptide
  MOD_RES (6)..(7): Xaa is C or S
TVPKPXXAPTQLSPISVLFI

SEQ ID NO: 6470 - protein, 14 aa, Artificial Sequence
  Cyclic GFR-binding peptide
  MOD_RES (1)..(1): Xaa is C or S
XVSQDLEPLPIVYY

SEQ ID NO: 6471 - protein, 13 aa, Artificial Sequence
  Cyclic GFR-binding peptide
VPTELEPLPMVYY

SEQ ID NO: 6472 - protein, 18 aa, Artificial Sequence
  Cyclic GFR-binding peptide
  MOD_RES (4)..(5): Xaa is C or S
GKAXXVPTKLSPISVLYI

SEQ ID NO: 6473 - protein, 18 aa, Artificial Sequence
  Cyclic GFR-binding peptide
TKLSPISVLYIDDMGVPT

SEQ ID NO: 6474 - protein, 18 aa, Artificial Sequence
  Cyclic GFR-binding peptide
  MOD_RES (4)..(5): Xaa is C or S
AAPXXVPQALSPISILFI

SEQ ID NO: 6475 - protein, 15 aa, Artificial Sequence
  Cyclic GFR-binding peptide
  MOD_RES (1)..(2): Xaa is C or S
XXVPTELEPLPMVYY

SEQ ID NO: 6476 - protein, 27 aa, Artificial Sequence
  Cyclic GFR-binding peptide
  MOD_RES (7)..(7): Xaa is C or S
HVTKPTXAPTKLSPISVLFIDDSSNVI

SEQ ID NO: 6477 - protein, 20 aa, Artificial Sequence
  Cyclic GFR-binding peptide
  MOD_RES (6)..(7): Xaa is C or S
TVPKPXXAPTQLSPISVLYI

SEQ ID NO: 6478 - protein, 20 aa, Artificial Sequence
  Cyclic GFR-binding peptide
  MOD_RES (6)..(7): Xaa is C or S
RVPSTXXAPVKTSPISMLYI

SEQ ID NO: 6479 - protein, 13 aa, Artificial Sequence
  Cyclic GFR-binding peptide
APTQLSPISVLFI

SEQ ID NO: 6480 - protein, 18 aa, Artificial Sequence
  Cyclic GFR-binding peptide
QDLSPISILFIIGKTPKI

SEQ ID NO: 6481 - protein, 16 aa, Artificial Sequence
  Cyclic GFR-binding peptide
LEPLTMLYYDEYDKVV

SEQ ID NO: 6482 - protein, 14 aa, Artificial Sequence
  Cyclic GFR-binding peptide
  MOD_RES (1)..(1): Xaa is C or S
XVPTKLSPISVLYI

SEQ ID NO: 6483 - protein, 16 aa, Artificial Sequence
  Cyclic GFR-binding peptide
LEPLPMVYYDENEKVV

SEQ ID NO: 6484 - protein, 16 aa, Artificial Sequence
  Cyclic GFR-binding peptide
LSPISMLFIDEYDKVV

SEQ ID NO: 6485 - protein, 17 aa, Artificial Sequence
  Cyclic GFR-binding peptide
QLEPLPVVYYDDSSNVI

SEQ ID NO: 6486 - protein, 13 aa, Artificial Sequence
  Cyclic GFR-binding peptide
VSQDLEPLPIVYY

SEQ ID NO: 6487 - protein, 17 aa, Artificial Sequence
  Cyclic GFR-binding peptide
DLEPLPIVYYIGKTPKI

SEQ ID NO: 6488 - protein, 27 aa, Artificial Sequence
  Cyclic GFR-binding peptide
  MOD_RES (6)..(7): Xaa is C or S
ASAAPXXVPQALSPISILFIVGRKPKV

SEQ ID NO: 6489 - protein, 17 aa, Artificial Sequence
  Cyclic GFR-binding peptide
KLEPLPVVYYDDSSNVI

SEQ ID NO: 6490 - protein, 19 aa, Artificial Sequence
  Cyclic GFR-binding peptide
  MOD_RES (5)..(6): Xaa is C or S
VPKPXXAPTQLEPLTVLYY

SEQ ID NO: 6491 - protein, 14 aa, Artificial Sequence
  Cyclic GFR-binding peptide
  MOD_RES (1)..(1): Xaa is C or S
XVPTELEPLTMLYY

SEQ ID NO: 6492 - protein, 15 aa, Artificial Sequence
  Cyclic GFR-binding peptide
EPLPIVYYIGKTPKI

SEQ ID NO: 6493 - protein, 27 aa, Artificial Sequence
  Cyclic GFR-binding peptide
  MOD_RES (6)..(7): Xaa is C or S
STPPTXXVPTRLEPLPIVYYDSANNVV

SEQ ID NO: 6494 - protein, 20 aa, Artificial Sequence
  Cyclic GFR-binding peptide
  MOD_RES (6)..(7): Xaa is C or S
AVPKAXXAPTKLSPISVLYI

SEQ ID NO: 6495 - protein, 15 aa, Artificial Sequence
  Cyclic GFR-binding peptide
  MOD_RES (1)..(2): Xaa is C or S
XXVPTRLEPLPIVYY

SEQ ID NO: 6496 - protein, 27 aa, Artificial Sequence
  Cyclic GFR-binding peptide
  MOD_RES (6)..(7): Xaa is C or S
ASASPXXVPQDLEPLPIVYYVGRTPKV

SEQ ID NO: 6497 - protein, 20 aa, Artificial Sequence
  Cyclic GFR-binding peptide
  MOD_RES (6)..(7): Xaa is C or S
YVPKPXXAPTKLEPLTVLYY

SEQ ID NO: 6498 - protein, 14 aa, Artificial Sequence
  Cyclic GFR-binding peptide
  MOD_RES (1)..(1): Xaa is C or S
XVPTELEPLPMVYY

SEQ ID NO: 6499 - protein, 27 aa, Artificial Sequence
  Cyclic GFR-binding peptide
  MOD_RES (6)..(7): Xaa is C or S
HVPKPXXAPTKLSPISVLYIDDSSNVI

SEQ ID NO: 6500 - protein, 19 aa, Artificial Sequence
  Cyclic GFR-binding peptide
PTELEPLTMLYYDEYDKVV

SEQ ID NO: 6501 - protein, 17 aa, Artificial Sequence
  Cyclic GFR-binding peptide
  MOD_RES (3)..(4): Xaa is C or S
SPXXVPQDLEPLPIVYY

SEQ ID NO: 6502 - protein, 13 aa, Artificial Sequence
  Cyclic GFR-binding peptide
VPQALSPISILFI

SEQ ID NO: 6503 - protein, 27 aa, Artificial Sequence
  Cyclic GFR-binding peptide
  MOD_RES (6)..(7): Xaa is C or S
KIPKAXXVPTELEPLTMLYYDENEKVV

SEQ ID NO: 6504 - protein, 16 aa, Artificial Sequence
  Cyclic GFR-binding peptide
  MOD_RES (2)..(3): Xaa is C or S
PXXVSQDLEPLPIVYY

SEQ ID NO: 6505 - protein, 16 aa, Artificial Sequence
  Cyclic GFR-binding peptide
  MOD_RES (2)..(3): Xaa is C or S
PXXTPTKMSPISMLYI

SEQ ID NO: 6506 - protein, 16 aa, Artificial Sequence
  Cyclic GFR-binding peptide
LSPISVLYIDSSNNVI

SEQ ID NO: 6507 - protein, 20 aa, Artificial Sequence
  Cyclic GFR-binding peptide
  MOD_RES (6)..(7): Xaa is C or S
SIPKAXXVPTELEPLTMLYY

SEQ ID NO: 6508 - protein, 18 aa, Artificial Sequence
  Cyclic GFR-binding peptide
  MOD_RES (4)..(5): Xaa is C or S
PPTXXVPTRLSPISILYI

SEQ ID NO: 6509 - protein, 15 aa, Artificial Sequence
  Cyclic GFR-binding peptide
  MOD_RES (1)..(2): Xaa is C or S
XXVPTRLSPISILYI

SEQ ID NO: 6510 - protein, 19 aa, Artificial Sequence
  Cyclic GFR-binding peptide
PTKMSPISMLYINDKQQII

SEQ ID NO: 6511 - protein, 17 aa, Artificial Sequence
  Cyclic GFR-binding peptide
ALSPISILFIVGRKPKV

SEQ ID NO: 6512 - protein, 17 aa, Artificial Sequence
  Cyclic GFR-binding peptide
KLSPISILYIDKGVVTY

SEQ ID NO: 6513 - protein, 15 aa, Artificial Sequence
  Cyclic GFR-binding peptide
  MOD_RES (1)..(2): Xaa is C or S
XXVSQDLEPLPIVYY

SEQ ID NO: 6514 - protein, 18 aa, Artificial Sequence
  Cyclic GFR-binding peptide
TRLEPLTILYYDSANNVV

SEQ ID NO: 6515 - protein, 20 aa, Artificial Sequence
  Cyclic GFR-binding peptide
  MOD_RES (6)..(7): Xaa is C or S
TVPKPXXAPTQLEPLTVLYY

SEQ ID NO: 6516 - protein, 18 aa, Artificial Sequence
  Cyclic GFR-binding peptide
QDLEPLPIVYYVGRTPKV

SEQ ID NO: 6517 - protein, 19 aa, Artificial Sequence
  Cyclic GFR-binding peptide
PQDLSPISILFIVGRTPKV

SEQ ID NO: 6518 - protein, 27 aa, Artificial Sequence
  Cyclic GFR-binding peptide
  MOD_RES (6)..(7): Xaa is C or S
YVPKPXXAPTKLSPISVLFIDDSSNVI

SEQ ID NO: 6519 - protein, 16 aa, Artificial Sequence
  Cyclic GFR-binding peptide
LSPISVLYIDDSSNVI

SEQ ID NO: 6520 - protein, 14 aa, Artificial Sequence
  Cyclic GFR-binding peptide
  MOD_RES (1)..(1): Xaa is C or S
XAPTKLSPISVLFI

SEQ ID NO: 6521 - protein, 13 aa, Artificial Sequence
  Cyclic GFR-binding peptide
VPTRLSPISILYI

SEQ ID NO: 6522 - protein, 16 aa, Artificial Sequence
  Cyclic GFR-binding peptide
LSPISILYIDKGVVTY

SEQ ID NO: 6523 - protein, 27 aa, Artificial Sequence
  Cyclic GFR-binding peptide
  MOD_RES (7)..(7): Xaa is C or S
HVTKPTXAPTKLEPLPVVYYDDSSNVI

SEQ ID NO: 6524 - protein, 17 aa, Artificial Sequence
  Cyclic GFR-binding peptide
KLSPISVLYIDSSNNVI

SEQ ID NO: 6525 - protein, 16 aa, Artificial Sequence
  Cyclic GFR-binding peptide
LSPISMLFIDENEKVV

SEQ ID NO: 6526 - protein, 17 aa, Artificial Sequence
  Cyclic GFR-binding peptide
KLSPISVLYIDDSSNVI

SEQ ID NO: 6527 - protein, 15 aa, Artificial Sequence
  Cyclic GFR-binding peptide
  MOD_RES (1)..(2): Xaa is C or S
XXVPTRLEPLTILYY

SEQ ID NO: 6528 - protein, 16 aa, Artificial Sequence
  Cyclic GFR-binding peptide
  MOD_RES (2)..(3): Xaa is C or S
PXXAPTQLSPISVLFI

SEQ ID NO: 6529 - protein, 17 aa, Artificial Sequence
  Cyclic GFR-binding peptide
QLSPISVLYIDDSSNVI

SEQ ID NO: 6530 - protein, 27 aa, Artificial Sequence
  Cyclic GFR-binding peptide
  MOD_RES (6)..(7): Xaa is C or S
RVPSTXXAPVKTSPISMLYIDNGRVLL

SEQ ID NO: 6531 - protein, 20 aa, Artificial Sequence
  Cyclic GFR-binding peptide
  MOD_RES (6)..(7): Xaa is C or S
KVGKAXXVPTKLSPISVLYI

SEQ ID NO: 6532 - protein, 19 aa, Artificial Sequence
  Cyclic GFR-binding peptide
  MOD_RES (5)..(6): Xaa is C or S
VPKPXXAPTKLSPISVLFI

SEQ ID NO: 6533 - protein, 15 aa, Artificial Sequence
  Cyclic GFR-binding peptide
  MOD_RES (1)..(2): Xaa is C or S
XXVPQDLSPISILFI

SEQ ID NO: 6534 - protein, 19 aa, Artificial Sequence
  Cyclic GFR-binding peptide
  MOD_RES (5)..(6): Xaa is C or S
SAAPXXVPQALEPLTILYY

SEQ ID NO: 6535 - protein, 16 aa, Artificial Sequence
  Cyclic GFR-binding peptide
LEPLPVVYYDDSSNVI

SEQ ID NO: 6536 - protein, 14 aa, Artificial Sequence
  Cyclic GFR-binding peptide
  MOD_RES (1)..(1): Xaa is C or S
XVPQDLSPISILFI

SEQ ID NO: 6537 - protein, 15 aa, Artificial Sequence
  Cyclic GFR-binding peptide
  MOD_RES (2)..(2): Xaa is C or S
TXAPTKLSPISVLYI

SEQ ID NO: 6538 - protein, 19 aa, Artificial Sequence
  Cyclic GFR-binding peptide
  MOD_RES (5)..(6): Xaa is C or S
TPPTXXVPTRLEPLPIVYY

SEQ ID NO: 6539 - protein, 19 aa, Artificial Sequence
  Cyclic GFR-binding peptide
PQALSPISILFIVGRKPKV

SEQ ID NO: 6540 - protein, 17 aa, Artificial Sequence
  Cyclic GFR-binding peptide
ELEPLTMLYYDEYDKVV

SEQ ID NO: 6541 - protein, 17 aa, Artificial Sequence
  Cyclic GFR-binding peptide
  MOD_RES (3)..(4): Xaa is C or S
PTXXVPTRLEPLTILYY

SEQ ID NO: 6542 - protein, 16 aa, Artificial Sequence
  Cyclic GFR-binding peptide
LEPLTILYYDSANNVV

SEQ ID NO: 6543 - protein, 15 aa, Artificial Sequence
  Cyclic GFR-binding peptide
  MOD_RES (1)..(2): Xaa is C or S
XXVPTELSPISMLYI

SEQ ID NO: 6544 - protein, 15 aa, Artificial Sequence
  Cyclic GFR-binding peptide
  MOD_RES (1)..(2): Xaa is C or S
XXAPTKLSPISVLFI

SEQ ID NO: 6545 - protein, 20 aa, Artificial Sequence
  Cyclic GFR-binding peptide
  MOD_RES (6)..(7): Xaa is C or S
STPPTXXVPTRLSPISILYI

SEQ ID NO: 6546 - protein, 19 aa, Artificial Sequence
  Cyclic GFR-binding peptide
PTKLSPISILYIDKGVVTY

SEQ ID NO: 6547 - protein, 18 aa, Artificial Sequence
  Cyclic GFR-binding peptide
  MOD_RES (4)..(5): Xaa is C or S
PPTXXVPTRLEPLPIVYY

SEQ ID NO: 6548 - protein, 19 aa, Artificial Sequence
  Cyclic GFR-binding peptide
PTRLEPLPIVYYDSANNVV

SEQ ID NO: 6549 - protein, 14 aa, Artificial Sequence
  Cyclic GFR-binding peptide
  MOD_RES (1)..(1): Xaa is C or S
XVPTELSPISMLYI

SEQ ID NO: 6550 - protein, 18 aa, Artificial Sequence
  Cyclic GFR-binding peptide
  MOD_RES (4)..(5): Xaa is C or S
PKPXXAPTKLSPISVLFI

SEQ ID NO: 6551 - protein, 13 aa, Artificial Sequence
  Cyclic GFR-binding peptide
APVKTSPISMLYI

SEQ ID NO: 6552 - protein, 17 aa, Artificial Sequence
  Cyclic GFR-binding peptide
RLSPISILYIDSANNVV

SEQ ID NO: 6553 - protein, 18 aa, Artificial Sequence
  Cyclic GFR-binding peptide
  MOD_RES (4)..(5): Xaa is C or S
PKPXXAPTQLSPISVLFI

SEQ ID NO: 6554 - protein, 15 aa, Artificial Sequence
  Cyclic GFR-binding peptide
  MOD_RES (1)..(2): Xaa is C or S
XXAPTQLSPISVLFI

SEQ ID NO: 6555 - protein, 15 aa, Artificial Sequence
  Cyclic GFR-binding peptide
EPLTMLYYDENEKVV

SEQ ID NO: 6556 - protein, 19 aa, Artificial Sequence
  Cyclic GFR-binding peptide
  MOD_RES (6)..(6): Xaa is C or S
VTKPTXAPTKLSPISVLFI

SEQ ID NO: 6557 - protein, 15 aa, Artificial Sequence
  Cyclic GFR-binding peptide
EPLPIVYYDSANNVV

SEQ ID NO: 6558 - protein, 18 aa, Artificial Sequence
  Cyclic GFR-binding peptide
  MOD_RES (4)..(5): Xaa is C or S
SKAXXVPTKLSPISILYI

SEQ ID NO: 6559 - protein, 18 aa, Artificial Sequence
  Cyclic GFR-binding peptide
TQLEPLTVLYYDDSSNVI

SEQ ID NO: 6560 - protein, 18 aa, Artificial Sequence
  Cyclic GFR-binding peptide
  MOD_RES (5)..(5): Xaa is C or S
TKPTXAPTKLSPISVLFI

SEQ ID NO: 6561 - protein, 19 aa, Artificial Sequence
  Cyclic GFR-binding peptide
PVKTSPISMLYIDNGRVLL

SEQ ID NO: 6562 - protein, 19 aa, Artificial Sequence
  Cyclic GFR-binding peptide
  MOD_RES (5)..(6): Xaa is C or S
IPKAXXVPTELEPLPMVYY

SEQ ID NO: 6563 - protein, 19 aa, Artificial Sequence
  Cyclic GFR-binding peptide
PTELSPISMLFIDENEKVV

SEQ ID NO: 6564 - protein, 18 aa, Artificial Sequence
  Cyclic GFR-binding peptide
TKLEPLTVLYYDDSSNVI

SEQ ID NO: 6565 - protein, 13 aa, Artificial Sequence
  Cyclic GFR-binding peptide
VPTRLEPLPIVYY

SEQ ID NO: 6566 - protein, 19 aa, Artificial Sequence
  Cyclic GFR-binding peptide
PTKLSPISVLYIDSSNNVI

SEQ ID NO: 6567 - protein, 20 aa, Artificial Sequence
  Cyclic GFR-binding peptide
  MOD_RES (6)..(7): Xaa is C or S
KIPKAXXVPTELSPISMLFI

SEQ ID NO: 6568 - protein, 16 aa, Artificial Sequence
  Cyclic GFR-binding peptide
LEPLTILYYVGRKPKV

SEQ ID NO: 6569 - protein, 15 aa, Artificial Sequence
  Cyclic GFR-binding peptide
  MOD_RES (2)..(2): Xaa is C or S
TXAPTKLEPLTVLYY

SEQ ID NO: 6570 - protein, 17 aa, Artificial Sequence
  Cyclic GFR-binding peptide
DLSPISILFIVGRTPKV

SEQ ID NO: 6571 - protein, 17 aa, Artificial Sequence
  Cyclic GFR-binding peptide
KMSPISMLYINDKQQII

SEQ ID NO: 6572 - protein, 15 aa, Artificial Sequence
  Cyclic GFR-binding peptide
SPISMLYIDEYDKVV

SEQ ID NO: 6573 - protein, 19 aa, Artificial Sequence
  Cyclic GFR-binding peptide
  MOD_RES (5)..(6): Xaa is C or S
SASPXXVSQDLEPLPIVYY

SEQ ID NO: 6574 - protein, 16 aa, Artificial Sequence
  Cyclic GFR-binding peptide
MSPISMLYINDKQQII

SEQ ID NO: 6575 - protein, 17 aa, Artificial Sequence
  Cyclic GFR-binding peptide
  MOD_RES (3)..(4): Xaa is C or S
PTXXVPTRLSPISILYI

SEQ ID NO: 6576 - protein, 18 aa, Artificial Sequence
  Cyclic GFR-binding peptide
TELEPLPMVYYDEYDKVV

SEQ ID NO: 6577 - protein, 27 aa, Artificial Sequence
  Cyclic GFR-binding peptide
  MOD_RES (6)..(7): Xaa is C or S
TVPKPXXAPTQLEPLTVLYYDDSSNVI

SEQ ID NO: 6578 - protein, 18 aa, Artificial Sequence
  Cyclic GFR-binding peptide
  MOD_RES (4)..(5): Xaa is C or S
ASPXXVSQDLSPISILFI

SEQ ID NO: 6579 - protein, 17 aa, Artificial Sequence
  Cyclic GFR-binding peptide
  MOD_RES (3)..(4): Xaa is C or S
KPXXAPTQLSPISVLFI

SEQ ID NO: 6580 - protein, 20 aa, Artificial Sequence
  Cyclic GFR-binding peptide
  MOD_RES (6)..(7): Xaa is C or S
YVPKPXXAPTKLEPLPVVYY

SEQ ID NO: 6581 - protein, 19 aa, Artificial Sequence
  Cyclic GFR-binding peptide
  MOD_RES (5)..(6): Xaa is C or S
SAGPXXTPTKMSPISMLYI

SEQ ID NO: 6582 - protein, 27 aa, Artificial Sequence
  Cyclic GFR-binding peptide
  MOD_RES (6)..(7): Xaa is C or S
KIPKAXXVPTELSPISMLFIDENEKVV

SEQ ID NO: 6583 - protein, 15 aa, Artificial Sequence
  Cyclic GFR-binding peptide
SPISVLYIDDSSNVI

SEQ ID NO: 6584 - protein, 20 aa, Artificial Sequence
  Cyclic GFR-binding peptide
  MOD_RES (6)..(7): Xaa is C or S
STPPTXXVPTRLEPLTILYY

SEQ ID NO: 6585 - protein, 17 aa, Artificial Sequence
  Cyclic GFR-binding peptide
ELSPISMLFIDENEKVV

SEQ ID NO: 6586 - protein, 20 aa, Artificial Sequence
  Cyclic GFR-binding peptide
  MOD_RES (6)..(7): Xaa is C or S
KASKAXXVPTKLSPISILYI

SEQ ID NO: 6587 - protein, 14 aa, Artificial Sequence
  Cyclic GFR-binding peptide
  MOD_RES (1)..(1): Xaa is C or S
XVPTRLSPISILYI

SEQ ID NO: 6588 - protein, 15 aa, Artificial Sequence
  Cyclic GFR-binding peptide
  MOD_RES (1)..(2): Xaa is C or S
XXAPTKLSPISVLYI

SEQ ID NO: 6589 - protein, 19 aa, Artificial Sequence
  Cyclic GFR-binding peptide
SQDLEPLPIVYYIGKTPKI

SEQ ID NO: 6590 - protein, 16 aa, Artificial Sequence
  Cyclic GFR-binding peptide
  MOD_RES (2)..(3): Xaa is C or S
PXXAPTKLSPISVLYI

SEQ ID NO: 6591 - protein, 18 aa, Artificial Sequence
  Cyclic GFR-binding peptide
  MOD_RES (4)..(5): Xaa is C or S
PKPXXAPTKLEPLTVLYY

SEQ ID NO: 6592 - protein, 18 aa, Artificial Sequence
  Cyclic GFR-binding peptide
  MOD_RES (4)..(5): Xaa is C or S
PKAXXVPTELEPLPMVYY

SEQ ID NO: 6593 - protein, 19 aa, Artificial Sequence
  Cyclic GFR-binding peptide
  MOD_RES (5)..(6): Xaa is C or S
IPKAXXVPTELSPISMLYI

SEQ ID NO: 6594 - protein, 18 aa, Artificial Sequence
  Cyclic GFR-binding peptide
TELEPLPMVYYDENEKVV

SEQ ID NO: 6595 - protein, 18 aa, Artificial Sequence
  Cyclic GFR-binding peptide
  MOD_RES (4)..(5): Xaa is C or S
ASPXXVSQDLEPLPIVYY

SEQ ID NO: 6596 - protein, 17 aa, Artificial Sequence
  Cyclic GFR-binding peptide
ELEPLTMLYYDENEKVV

SEQ ID NO: 6597 - protein, 14 aa, Artificial Sequence
  Cyclic GFR-binding peptide
  MOD_RES (1)..(1): Xaa is C or S
XAPTQLSPISVLYI

SEQ ID NO: 6598 - protein, 20 aa, Artificial Sequence
  Cyclic GFR-binding peptide
  MOD_RES (6)..(7): Xaa is C or S
ASAAPXXVPQALSPISILFI

SEQ ID NO: 6599 - protein, 17 aa, Artificial Sequence
  Cyclic GFR-binding peptide
ELSPISMLYIDENEKVV

SEQ ID NO: 6600 - protein, 15 aa, Artificial Sequence
  Cyclic GFR-binding peptide
SPISVLFIDDSSNVI

SEQ ID NO: 6601 - protein, 16 aa, Artificial Sequence
  Cyclic GFR-binding peptide
  MOD_RES (2)..(3): Xaa is C or S
AXXVPTELSPISMLYI

SEQ ID NO: 6602 - protein, 15 aa, Artificial Sequence
  Cyclic GFR-binding peptide
  MOD_RES (1)..(2): Xaa is C or S
XXVPTKLSPISVLYI

SEQ ID NO: 6603 - protein, 13 aa, Artificial Sequence
  Cyclic GFR-binding peptide
VPQALEPLTILYY

SEQ ID NO: 6604 - protein, 15 aa, Artificial Sequence
  Cyclic GFR-binding peptide
SPISVLYIDDMGVPT

SEQ ID NO: 6605 - protein, 17 aa, Artificial Sequence
  Cyclic GFR-binding peptide
  MOD_RES (3)..(4): Xaa is C or S
PTXXVPTRLEPLPIVYY

SEQ ID NO: 6606 - protein, 18 aa, Artificial Sequence
  Cyclic GFR-binding peptide
TELSPISMLYIDEYDKVV

SEQ ID NO: 6607 - protein, 15 aa, Artificial Sequence
  Cyclic GFR-binding peptide
EPLPIVYYVGRTPKV

SEQ ID NO: 6608 - protein, 13 aa, Artificial Sequence
  Cyclic GFR-binding peptide
APTQLEPLTVLYY

SEQ ID NO: 6609 - protein, 15 aa, Artificial Sequence
  Cyclic GFR-binding peptide
EPLPMVYYDEYDKVV

SEQ ID NO: 6610 - protein, 18 aa, Artificial Sequence
  Cyclic GFR-binding peptide
TELSPISMLFIDEYDKVV

SEQ ID NO: 6611 - protein, 18 aa, Artificial Sequence
  Cyclic GFR-binding peptide
  MOD_RES (4)..(5): Xaa is C or S
PPTXXVPTRLEPLTILYY

SEQ ID NO: 6612 - protein, 13 aa, Artificial Sequence
  Cyclic GFR-binding peptide
VPTELSPISMLYI

SEQ ID NO: 6613 - protein, 27 aa, Artificial Sequence
  Cyclic GFR-binding peptide
  MOD_RES (6)..(7): Xaa is C or S
SIPKAXXVPTELSPISMLYIDEYDKVV

SEQ ID NO: 6614 - protein, 18 aa, Artificial Sequence
  Cyclic GFR-binding peptide
  MOD_RES (4)..(5): Xaa is C or S
PKPXXAPTKLEPLPVVYY

SEQ ID NO: 6615 - protein, 16 aa, Artificial Sequence
  Cyclic GFR-binding peptide
LEPLPIVYYDSANNVV

SEQ ID NO: 6616 - protein, 20 aa, Artificial Sequence
  Cyclic GFR-binding peptide
  MOD_RES (6)..(7): Xaa is C or S
SIPKAXXVPTELSPISMLYI

SEQ ID NO: 6617 - protein, 13 aa, Artificial Sequence
  Cyclic GFR-binding peptide
VPTKLSPISVLYI

SEQ ID NO: 6618 - protein, 18 aa, Artificial Sequence
  Cyclic GFR-binding peptide
TKLSPISVLYIDSSNNVI

SEQ ID NO: 6619 - protein, 19 aa, Artificial Sequence
  Cyclic GFR-binding peptide
  MOD_RES (5)..(6): Xaa is C or S
VPKAXXAPTKLSPISVLYI

SEQ ID NO: 6620 - protein, 13 aa, Artificial Sequence
  Cyclic GFR-binding peptide
VPTRLEPLTILYY

SEQ ID NO: 6621 - protein, 20 aa, Artificial Sequence
  Cyclic GFR-binding peptide
  MOD_RES (6)..(7): Xaa is C or S
ASASPXXVPQDLSPISILFI

SEQ ID NO: 6622 - protein, 17 aa, Artificial Sequence
  Cyclic GFR-binding peptide
  MOD_RES (3)..(4): Xaa is C or S
KPXXAPTKLSPISVLFI

SEQ ID NO: 6623 - protein, 15 aa, Artificial Sequence
  Cyclic GFR-binding peptide
SPISILYIDSANNVV

SEQ ID NO: 6624 - protein, 16 aa, Artificial Sequence
  Cyclic GFR-binding peptide
  MOD_RES (2)..(3): Xaa is C or S
AXXVPTKLSPISILYI

SEQ ID NO: 6625 - protein, 19 aa, Artificial Sequence
  Cyclic GFR-binding peptide
PTELEPLPMVYYDEYDKVV

SEQ ID NO: 6626 - protein, 15 aa, Artificial Sequence
  Cyclic GFR-binding peptide
EPLTVLYYDDSSNVI

SEQ ID NO: 6627 - protein, 27 aa, Artificial Sequence
  Cyclic GFR-binding peptide
  MOD_RES (6)..(7): Xaa is C or S
ASASPXXVSQDLEPLPIVYYIGKTPKI

SEQ ID NO: 6628 - protein, 16 aa, Artificial Sequence
  Cyclic GFR-binding peptide
  MOD_RES (2)..(3): Xaa is C or S
PXXVPQALEPLTILYY

SEQ ID NO: 6629 - protein, 20 aa, Artificial Sequence
  Cyclic GFR-binding peptide
  MOD_RES (6)..(7): Xaa is C or S
YVPKPXXAPTKLSPISVLYI

SEQ ID NO: 6630 - protein, 18 aa, Artificial Sequence
  Cyclic GFR-binding peptide
TKLSPISILYIDKGVVTY

SEQ ID NO: 6631 - protein, 17 aa, Artificial Sequence
  Cyclic GFR-binding peptide
QLSPISVLFIDDSSNVI

SEQ ID NO: 6632 - protein, 15 aa, Artificial Sequence
  Cyclic GFR-binding peptide
SPISMLYIDENEKVV

SEQ ID NO: 6633 - protein, 16 aa, Artificial Sequence
  Cyclic GFR-binding peptide
LSPISMLYIDENEKVV

SEQ ID NO: 6634 - protein, 13 aa, Artificial Sequence
  Cyclic GFR-binding peptide
TPTKMSPISMLYI

SEQ ID NO: 6635 - protein, 17 aa, Artificial Sequence
  Cyclic GFR-binding peptide
KLSPISVLFIDDSSNVI

SEQ ID NO: 6636 - protein, 27 aa, Artificial Sequence
  Cyclic GFR-binding peptide
  MOD_RES (6)..(7): Xaa is C or S
SIPKAXXVPTELSPISMLFIDEYDKVV

SEQ ID NO: 6637 - protein, 18 aa, Artificial Sequence
  Cyclic GFR-binding peptide
  MOD_RES (4)..(5): Xaa is C or S
PKAXXVPTELEPLTMLYY

SEQ ID NO: 6638 - protein, 17 aa, Artificial Sequence
  Cyclic GFR-binding peptide
  MOD_RES (3)..(4): Xaa is C or S
KAXXVPTELSPISMLFI

SEQ ID NO: 6639 - protein, 19 aa, Artificial Sequence
  Cyclic GFR-binding peptide
  MOD_RES (5)..(6): Xaa is C or S
ASKAXXVPTKLSPISILYI

SEQ ID NO: 6640 - protein, 17 aa, Artificial Sequence
  Cyclic GFR-binding peptide
  MOD_RES (3)..(4): Xaa is C or S
APXXVPQALSPISILFI

SEQ ID NO: 6641 - protein, 27 aa, Artificial Sequence
  Cyclic GFR-binding peptide
  MOD_RES (6)..(7): Xaa is C or S
KASKAXXVPTKLSPISILYIDKGVVTY

SEQ ID NO: 6642 - protein, 16 aa, Artificial Sequence
  Cyclic GFR-binding peptide
LEPLTMLYYDENEKVV

SEQ ID NO: 6643 - protein, 19 aa, Artificial Sequence
  Cyclic GFR-binding peptide
  MOD_RES (5)..(6): Xaa is C or S
VPKPXXAPTQLSPISVLYI

SEQ ID NO: 6644 - protein, 20 aa, Artificial Sequence
  Cyclic GFR-binding peptide
  MOD_RES (6)..(7): Xaa is C or S
ASASPXXVPQDLEPLPIVYY

SEQ ID NO: 6645 - protein, 17 aa, Artificial Sequence
  Cyclic GFR-binding peptide
  MOD_RES (3)..(4): Xaa is C or S
KPXXAPTKLEPLPVVYY

SEQ ID NO: 6646 - protein, 16 aa, Artificial Sequence
  Cyclic GFR-binding peptide
  MOD_RES (2)..(3): Xaa is C or S
AXXAPTKLSPISVLYI

SEQ ID NO: 6647 - protein, 19 aa, Artificial Sequence
  Cyclic GFR-binding peptide
  MOD_RES (5)..(6): Xaa is C or S
VPKPXXAPTKLSPISVLYI

SEQ ID NO: 6648 - protein, 17 aa, Artificial Sequence
  Cyclic GFR-binding peptide
  MOD_RES (3)..(4): Xaa is C or S
KAXXVPTKLSPISVLYI

SEQ ID NO: 6649 - protein, 16 aa, Artificial Sequence
  Cyclic GFR-binding peptide
  MOD_RES (3)..(3): Xaa is C or S
PTXAPTKLSPISVLYI

SEQ ID NO: 6650 - protein, 19 aa, Artificial Sequence
  Cyclic GFR-binding peptide
PTKLSPISVLYIDDSSNVI

SEQ ID NO: 6651 - protein, 19 aa, Artificial Sequence
  Cyclic GFR-binding peptide
PTKLSPISVLFIDDSSNVI

SEQ ID NO: 6652 - protein, 19 aa, Artificial Sequence
  Cyclic GFR-binding peptide
  MOD_RES (5)..(6): Xaa is C or S
TPPTXXVPTRLEPLTILYY

SEQ ID NO: 6653 - protein, 20 aa, Artificial Sequence
  Cyclic GFR-binding peptide
  MOD_RES (6)..(7): Xaa is C or S
STPPTXXVPTRLEPLPIVYY

SEQ ID NO: 6654 - protein, 16 aa, Artificial Sequence
  Cyclic GFR-binding peptide
TSPISMLYIDNGRVLL

SEQ ID NO: 6655 - protein, 16 aa, Artificial Sequence
  Cyclic GFR-binding peptide
LSPISVLYIDDMGVPT

SEQ ID NO: 6656 - protein, 19 aa, Artificial Sequence
  Cyclic GFR-binding peptide
  MOD_RES (5)..(6): Xaa is C or S
VPSTXXAPVKTSPISMLYI

SEQ ID NO: 6657 - protein, 19 aa, Artificial Sequence
  Cyclic GFR-binding peptide
PTQLSPISVLYIDDSSNVI

SEQ ID NO: 6658 - protein, 15 aa, Artificial Sequence
  Cyclic GFR-binding peptide
SPISMLYINDKQQII

SEQ ID NO: 6659 - protein, 19 aa, Artificial Sequence
  Cyclic GFR-binding peptide
PTQLSPISVLFIDDSSNVI

SEQ ID NO: 6660 - protein, 27 aa, Artificial Sequence
  Cyclic GFR-binding peptide
  MOD_RES (6)..(7): Xaa is C or S
GSAGPXXTPTKMSPISMLYINDKQQII

SEQ ID NO: 6661 - protein, 18 aa, Artificial Sequence
  Cyclic GFR-binding peptide
  MOD_RES (4)..(5): Xaa is C or S
PKAXXVPTELSPISMLFI

SEQ ID NO: 6662 - protein, 15 aa, Artificial Sequence
  Cyclic GFR-binding peptide
SPISMLFIDENEKVV

SEQ ID NO: 6663 - protein, 17 aa, Artificial Sequence
  Cyclic GFR-binding peptide
KLSPISVLYIDDMGVPT

SEQ ID NO: 6664 - protein, 17 aa, Artificial Sequence
  Cyclic GFR-binding peptide
  MOD_RES (4)..(4): Xaa is C or S
KPTXAPTKLSPISVLYI

SEQ ID NO: 6665 - protein, 17 aa, Artificial Sequence
  Cyclic GFR-binding peptide
  MOD_RES (3)..(4): Xaa is C or S
KAXXVPTELEPLPMVYY

SEQ ID NO: 6666 - protein, 16 aa, Artificial Sequence
  Cyclic GFR-binding peptide
LSPISMLYIDEYDKVV

SEQ ID NO: 6667 - protein, 19 aa, Artificial Sequence
  Cyclic GFR-binding peptide
PTKLSPISVLYIDDMGVPT

SEQ ID NO: 6668 - protein, 15 aa, Artificial Sequence
  Cyclic GFR-binding peptide
  MOD_RES (1)..(2): Xaa is C or S
XXAPTQLEPLPVVYY

SEQ ID NO: 6669 - protein, 27 aa, Artificial Sequence
  Cyclic GFR-binding peptide
  MOD_RES (6)..(7): Xaa is C or S
YVPKPXXAPTKLEPLPVVYYDDSSNVI

SEQ ID NO: 6670 - protein, 18 aa, Artificial Sequence
  Cyclic GFR-binding peptide
  MOD_RES (4)..(5): Xaa is C or S
PSTXXAPVKTSPISMLYI

SEQ ID NO: 6671 - protein, 17 aa, Artificial Sequence
  Cyclic GFR-binding peptide
  MOD_RES (3)..(4): Xaa is C or S
KPXXAPTKLEPLTVLYY

SEQ ID NO: 6672 - protein, 16 aa, Artificial Sequence
  Cyclic GFR-binding peptide
  MOD_RES (2)..(3): Xaa is C or S
PXXAPTQLSPISVLYI

SEQ ID NO: 6673 - protein, 27 aa, Artificial Sequence
  Cyclic GFR-binding peptide
  MOD_RES (6)..(7): Xaa is C or S
ASAAPXXVPQALEPLTILYYVGRKPKV

SEQ ID NO: 6674 - protein, 15 aa, Artificial Sequence
  Cyclic GFR-binding peptide
  MOD_RES (1)..(2): Xaa is C or S
XXVPTKLSPISILYI

SEQ ID NO: 6675 - protein, 20 aa, Artificial Sequence
  Cyclic GFR-binding peptide
  MOD_RES (6)..(7): Xaa is C or S
ASAAPXXVPQALEPLTILYY

SEQ ID NO: 6676 - protein, 19 aa, Artificial Sequence
  Cyclic GFR-binding peptide
  MOD_RES (5)..(6): Xaa is C or S
SASPXXVSQDLSPISILFI

SEQ ID NO: 6677 - protein, 14 aa, Artificial Sequence
  Cyclic GFR-binding peptide
  MOD_RES (1)..(1): Xaa is C or S
XVPQDLEPLPIVYY

SEQ ID NO: 6678 - protein, 16 aa, Artificial Sequence
  Cyclic GFR-binding peptide
LSPISILFIVGRTPKV

SEQ ID NO: 6679 - protein, 27 aa, Artificial Sequence
  Cyclic GFR-binding peptide
  MOD_RES (6)..(7): Xaa is C or S
TVPKPXXAPTQLEPLPVVYYDDSSNVI

SEQ ID NO: 6680 - protein, 18 aa, Artificial Sequence
  Cyclic GFR-binding peptide
  MOD_RES (4)..(5): Xaa is C or S
PKPXXAPTQLEPLTVLYY

SEQ ID NO: 6681 - protein, 15 aa, Artificial Sequence
  Cyclic GFR-binding peptide
  MOD_RES (1)..(2): Xaa is C or S
XXVPTELSPISMLFI

SEQ ID NO: 6682 - protein, 20 aa, Artificial Sequence
  Cyclic GFR-binding peptide
  MOD_RES (6)..(7): Xaa is C or S
TVPKPXXAPTQLEPLPVVYY

SEQ ID NO: 6683 - protein, 16 aa, Artificial Sequence
  Cyclic GFR-binding peptide
  MOD_RES (2)..(3): Xaa is C or S
PXXAPTQLEPLPVVYY

SEQ ID NO: 6684 - protein, 15 aa, Artificial Sequence
  Cyclic GFR-binding peptide
  MOD_RES (1)..(2): Xaa is C or S
XXTPTKMSPISMLYI

SEQ ID NO: 6685 - protein, 16 aa, Artificial Sequence
  Cyclic GFR-binding peptide
LSPISVLFIDDSSNVI

SEQ ID NO: 6686 - protein, 19 aa, Artificial Sequence
  Cyclic GFR-binding peptide
PTELEPLPMVYYDENEKVV

SEQ ID NO: 6687 - protein, 15 aa, Artificial Sequence
  Cyclic GFR-binding peptide
SPISILFIVGRKPKV

SEQ ID NO: 6688 - protein, 14 aa, Artificial Sequence
  Cyclic GFR-binding peptide
  MOD_RES (1)..(1): Xaa is C or S
XAPTKLSPISVLYI

SEQ ID NO: 6689 - protein, 17 aa, Artificial Sequence
  Cyclic GFR-binding peptide
ALEPLTILYYVGRKPKV

SEQ ID NO: 6690 - protein, 18 aa, Artificial Sequence
  Cyclic GFR-binding peptide
  MOD_RES (4)..(5): Xaa is C or S
PKPXXAPTQLSPISVLYI

SEQ ID NO: 6691 - protein, 19 aa, Artificial Sequence
  Cyclic GFR-binding peptide
PTKLEPLTVLYYDDSSNVI

SEQ ID NO: 6692 - protein, 18 aa, Artificial Sequence
  Cyclic GFR-binding peptide
  MOD_RES (4)..(5): Xaa is C or S
AAPXXVPQALEPLTILYY

SEQ ID NO: 6693 - protein, 13 aa, Artificial Sequence
  Cyclic GFR-binding peptide
APTQLSPISVLYI

SEQ ID NO: 6694 - protein, 19 aa, Artificial Sequence
  Cyclic GFR-binding peptide
PTQLEPLTVLYYDDSSNVI

SEQ ID NO: 6695 - protein, 13 aa, Artificial Sequence
  Cyclic GFR-binding peptide
VPTKLSPISILYI

SEQ ID NO: 6696 - protein, 19 aa, Artificial Sequence
  Cyclic GFR-binding peptide
  MOD_RES (5)..(6): Xaa is C or S
VPKPXXAPTQLEPLPVVYY

SEQ ID NO: 6697 - protein, 19 aa, Artificial Sequence
  Cyclic GFR-binding peptide
PTELSPISMLYIDENEKVV

SEQ ID NO: 6698 - protein, 27 aa, Artificial Sequence
  Cyclic GFR-binding peptide
  MOD_RES (6)..(7): Xaa is C or S
ASASPXXVPQDLSPISILFIVGRTPKV

SEQ ID NO: 6699 - protein, 15 aa, Artificial Sequence
  Cyclic GFR-binding peptide
  MOD_RES (1)..(2): Xaa is C or S
XXAPTQLEPLTVLYY

SEQ ID NO: 6700 - protein, 18 aa, Artificial Sequence
  Cyclic GFR-binding peptide
VKTSPISMLYIDNGRVLL

SEQ ID NO: 6701 - protein, 27 aa, Artificial Sequence
  Cyclic GFR-binding peptide
  MOD_RES (6)..(7): Xaa is C or S
KIPKAXXVPTELEPLPMVYYDENEKVV

SEQ ID NO: 6702 - protein, 17 aa, Artificial Sequence
  Cyclic GFR-binding peptide
  MOD_RES (3)..(4): Xaa is C or S
KAXXAPTKLSPISVLYI

SEQ ID NO: 6703 - protein, 17 aa, Artificial Sequence
  Cyclic GFR-binding peptide
  MOD_RES (3)..(4): Xaa is C or S
SPXXVPQDLSPISILFI

SEQ ID NO: 6704 - protein, 15 aa, Artificial Sequence
  Cyclic GFR-binding peptide
  MOD_RES (1)..(2): Xaa is C or S
XXAPTQLSPISVLYI

SEQ ID NO: 6705 - protein, 18 aa, Artificial Sequence
  Cyclic GFR-binding peptide
QDLEPLPIVYYIGKTPKI

SEQ ID NO: 6706 - protein, 27 aa, Artificial Sequence
  Cyclic GFR-binding peptide
  MOD_RES (6)..(7): Xaa is C or S
YVPKPXXAPTKLSPISVLYIDDSSNVI

SEQ ID NO: 6707 - protein, 19 aa, Artificial Sequence
  Cyclic GFR-binding peptide
  MOD_RES (6)..(6): Xaa is C or S
VTKPTXAPTKLSPISVLYI

SEQ ID NO: 6708 - protein, 16 aa, Artificial Sequence
  Cyclic GFR-binding peptide
  MOD_RES (2)..(3): Xaa is C or S
PXXVPQALSPISILFI

SEQ ID NO: 6709 - protein, 16 aa, Artificial Sequence
  Cyclic GFR-binding peptide
  MOD_RES (2)..(3): Xaa is C or S
TXXVPTRLSPISILYI

SEQ ID NO: 6710 - protein, 15 aa, Artificial Sequence
  Cyclic GFR-binding peptide
EPLTILYYVGRKPKV

SEQ ID NO: 6711 - protein, 27 aa, Artificial Sequence
  Cyclic GFR-binding peptide
  MOD_RES (6)..(7): Xaa is C or S
TVPKPXXAPTQLSPISVLYIDDSSNVI

SEQ ID NO: 6712 - protein, 18 aa, Artificial Sequence
  Cyclic GFR-binding peptide
  MOD_RES (4)..(5): Xaa is C or S
ASPXXVPQDLEPLPIVYY

SEQ ID NO: 6713 - protein, 18 aa, Artificial Sequence
  Cyclic GFR-binding peptide
  MOD_RES (5)..(5): Xaa is C or S
TKPTXAPTKLSPISVLYI

SEQ ID NO: 6714 - protein, 17 aa, Artificial Sequence
  Cyclic GFR-binding peptide
ELSPISMLYIDEYDKVV

SEQ ID NO: 6715 - protein, 18 aa, Artificial Sequence
  Cyclic GFR-binding peptide
  MOD_RES (4)..(5): Xaa is C or S
PKAXXAPTKLSPISVLYI

SEQ ID NO: 6716 - protein, 19 aa, Artificial Sequence
  Cyclic GFR-binding peptide
PQDLEPLPIVYYVGRTPKV

SEQ ID NO: 6717 - protein, 20 aa, Artificial Sequence
  Cyclic GFR-binding peptide
  MOD_RES (6)..(7): Xaa is C or S
KIPKAXXVPTELSPISMLYI

SEQ ID NO: 6718 - protein, 18 aa, Artificial Sequence
  Cyclic GFR-binding peptide
  MOD_RES (4)..(5): Xaa is C or S
AGPXXTPTKMSPISMLYI

SEQ ID NO: 6719 - protein, 16 aa, Artificial Sequence
  Cyclic GFR-binding peptide
  MOD_RES (2)..(3): Xaa is C or S
AXXVPTKLSPISVLYI

SEQ ID NO: 6720 - protein, 17 aa, Artificial Sequence
  Cyclic GFR-binding peptide
RLEPLTILYYDSANNVV

SEQ ID NO: 6721 - protein, 15 aa, Artificial Sequence
  Cyclic GFR-binding peptide
SPISMLYIDNGRVLL

SEQ ID NO: 6722 - protein, 27 aa, Artificial Sequence
  Cyclic GFR-binding peptide
  MOD_RES (6)..(7): Xaa is C or S
AVPKAXXAPTKLSPISVLYIDSSNNVI

SEQ ID NO: 6723 - protein, 18 aa, Artificial Sequence
  Cyclic GFR-binding peptide
  MOD_RES (5)..(5): Xaa is C or S
TKPTXAPTKLEPLPVVYY

SEQ ID NO: 6724 - protein, 18 aa, Artificial Sequence
  Cyclic GFR-binding peptide
TRLEPLPIVYYDSANNVV

SEQ ID NO: 6725 - protein, 17 aa, Artificial Sequence
  Cyclic GFR-binding peptide
  MOD_RES (3)..(4): Xaa is C or S
KPXXAPTKLSPISVLYI

SEQ ID NO: 6726 - protein, 16 aa, Artificial Sequence
  Cyclic GFR-binding peptide
LEPLPMVYYDEYDKVV

SEQ ID NO: 6727 - protein, 15 aa, Artificial Sequence
  Cyclic GFR-binding peptide
  MOD_RES (1)..(2): Xaa is C or S
XXVPQALEPLTILYY

SEQ ID NO: 6728 - protein, 17 aa, Artificial Sequence
  Cyclic GFR-binding peptide
  MOD_RES (3)..(4): Xaa is C or S
KPXXAPTQLSPISVLYI

SEQ ID NO: 6729 - protein, 15 aa, Artificial Sequence
  Cyclic GFR-binding peptide
EPLPVVYYDDSSNVI

SEQ ID NO: 6730 - protein, 13 aa, Artificial Sequence
  Cyclic GFR-binding peptide
APTKLEPLTVLYY

SEQ ID NO: 6731 - protein, 20 aa, Artificial Sequence
  Cyclic GFR-binding peptide
  MOD_RES (6)..(7): Xaa is C or S
KIPKAXXVPTELEPLPMVYY

SEQ ID NO: 6732 - protein, 14 aa, Artificial Sequence
  Cyclic GFR-binding peptide
  MOD_RES (1)..(1): Xaa is C or S
XVPQALEPLTILYY

SEQ ID NO: 6733 - protein, 17 aa, Artificial Sequence
  Cyclic GFR-binding peptide
  MOD_RES (3)..(4): Xaa is C or S
SPXXVSQDLSPISILFI

SEQ ID NO: 6734 - protein, 27 aa, Artificial Sequence
  Cyclic GFR-binding peptide
  MOD_RES (7)..(7): Xaa is C or S
HVTKPTXAPTKLEPLTVLYYDDSSNVI

SEQ ID NO: 6735 - protein, 19 aa, Artificial Sequence
  Cyclic GFR-binding peptide
  MOD_RES (5)..(6): Xaa is C or S
VGKAXXVPTKLSPISVLYI

SEQ ID NO: 6736 - protein, 16 aa, Artificial Sequence
  Cyclic GFR-binding peptide
  MOD_RES (2)..(3): Xaa is C or S
TXXAPVKTSPISMLYI

SEQ ID NO: 6737 - protein, 27 aa, Artificial Sequence
  Cyclic GFR-binding peptide
  MOD_RES (6)..(7): Xaa is C or S
KVGKAXXVPTKLSPISVLYIDDMGVPT

SEQ ID NO: 6738 - protein, 27 aa, Artificial Sequence
  Cyclic GFR-binding peptide
  MOD_RES (6)..(7): Xaa is C or S
STPPTXXVPTRLEPLTILYYDSANNVV

SEQ ID NO: 6739 - protein, 27 aa, Artificial Sequence
  Cyclic GFR-binding peptide
  MOD_RES (6)..(7): Xaa is C or S
KIPKAXXVPTELSPISMLYIDENEKVV

SEQ ID NO: 6740 - protein, 18 aa, Artificial Sequence
  Cyclic GFR-binding peptide
  MOD_RES (4)..(5): Xaa is C or S
PKPXXAPTKLSPISVLYI

SEQ ID NO: 6741 - protein, 16 aa, Artificial Sequence
  Cyclic GFR-binding peptide
LEPLPIVYYIGKTPKI

SEQ ID NO: 6742 - protein, 15 aa, Artificial Sequence
  Cyclic GFR-binding peptide
  MOD_RES (1)..(2): Xaa is C or S
XXAPTKLEPLTVLYY

SEQ ID NO: 6743 - protein, 19 aa, Artificial Sequence
  Cyclic GFR-binding peptide
PTRLEPLTILYYDSANNVV

SEQ ID NO: 6744 - protein, 18 aa, Artificial Sequence
  Cyclic GFR-binding peptide
TRLSPISILYIDSANNVV

SEQ ID NO: 6745 - protein, 18 aa, Artificial Sequence
  Cyclic GFR-binding peptide
TKMSPISMLYINDKQQII

SEQ ID NO: 6746 - protein, 20 aa, Artificial Sequence
  Cyclic GFR-binding peptide
  MOD_RES (7)..(7): Xaa is C or S
HVTKPTXAPTKLEPLTVLYY

SEQ ID NO: 6747 - protein, 20 aa, Artificial Sequence
  Cyclic GFR-binding peptide
  MOD_RES (7)..(7): Xaa is C or S
HVTKPTXAPTKLSPISVLYI

SEQ ID NO: 6748 - protein, 13 aa, Artificial Sequence
  Cyclic GFR-binding peptide
APTKLSPISVLYI

SEQ ID NO: 6749 - protein, 18 aa, Artificial Sequence
  Cyclic GFR-binding peptide
TKLEPLPVVYYDDSSNVI

SEQ ID NO: 6750 - protein, 15 aa, Artificial Sequence
  Cyclic GFR-binding peptide
SPISILFIIGKTPKI

SEQ ID NO: 6751 - protein, 14 aa, Artificial Sequence
  Cyclic GFR-binding peptide
  MOD_RES (1)..(1): Xaa is C or S
XAPTKLEPLPVVYY

SEQ ID NO: 6752 - protein, 18 aa, Artificial Sequence
  Cyclic GFR-binding peptide
TELEPLTMLYYDEYDKVV

SEQ ID NO: 6753 - protein, 16 aa, Artificial Sequence
  Cyclic GFR-binding peptide
  MOD_RES (2)..(3): Xaa is C or S
TXXVPTRLEPLPIVYY

SEQ ID NO: 6754 - protein, 18 aa, Artificial Sequence
  Cyclic GFR-binding peptide
  MOD_RES (4)..(5): Xaa is C or S
PKPXXAPTQLEPLPVVYY

SEQ ID NO: 6755 - protein, 15 aa, Artificial Sequence
  Cyclic GFR-binding peptide
EPLTILYYDSANNVV

SEQ ID NO: 6756 - protein, 16 aa, Artificial Sequence
  Cyclic GFR-binding peptide
LEPLTVLYYDDSSNVI

SEQ ID NO: 6757 - protein, 16 aa, Artificial Sequence
  Cyclic GFR-binding peptide
  MOD_RES (2)..(3): Xaa is C or S
PXXAPTQLEPLTVLYY

SEQ ID NO: 6758 - protein, 17 aa, Artificial Sequence
  Cyclic GFR-binding peptide
KLEPLTVLYYDDSSNVI

SEQ ID NO: 6759 - protein, 18 aa, Artificial Sequence
  Cyclic GFR-binding peptide
TQLEPLPVVYYDDSSNVI

SEQ ID NO: 6760 - protein, 17 aa, Artificial Sequence
  Cyclic GFR-binding peptide
ELEPLPMVYYDEYDKVV

SEQ ID NO: 6761 - protein, 19 aa, Artificial Sequence
  Cyclic GFR-binding peptide
  MOD_RES (6)..(6): Xaa is C or S
VTKPTXAPTKLEPLPVVYY

SEQ ID NO: 6762 - protein, 13 aa, Artificial Sequence
  Cyclic GFR-binding peptide
APTQLEPLPVVYY

SEQ ID NO: 6763 - protein, 17 aa, Artificial Sequence
  Cyclic GFR-binding peptide
  MOD_RES (3)..(4): Xaa is C or S
KAXXVPTKLSPISILYI

SEQ ID NO: 6764 - protein, 16 aa, Artificial Sequence
  Cyclic GFR-binding peptide
  MOD_RES (2)..(3): Xaa is C or S
PXXVSQDLSPISILFI

SEQ ID NO: 6765 - protein, 16 aa, Artificial Sequence
  Cyclic GFR-binding peptide
  MOD_RES (2)..(3): Xaa is C or S
AXXVPTELEPLPMVYY

SEQ ID NO: 6766 - protein, 17 aa, Artificial Sequence
  Cyclic GFR-binding peptide
  MOD_RES (3)..(4): Xaa is C or S
STXXAPVKTSPISMLYI

SEQ ID NO: 6767 - protein, 17 aa, Artificial Sequence
  Cyclic GFR-binding peptide
QLEPLTVLYYDDSSNVI

SEQ ID NO: 6768 - protein, 14 aa, Artificial Sequence
  Cyclic GFR-binding peptide
  MOD_RES (1)..(1): Xaa is C or S
XTPTKMSPISMLYI

SEQ ID NO: 6769 - protein, 27 aa, Artificial Sequence
  Cyclic GFR-binding peptide
  MOD_RES (6)..(7): Xaa is C or S
SIPKAXXVPTELEPLTMLYYDEYDKVV

SEQ ID NO: 6770 - protein, 18 aa, Artificial Sequence
  Cyclic GFR-binding peptide
QDLSPISILFIVGRTPKV

SEQ ID NO: 6771 - protein, 14 aa, Artificial Sequence
  Cyclic GFR-binding peptide
  MOD_RES (1)..(1): Xaa is C or S
XVPTELSPISMLFI

SEQ ID NO: 6772 - protein, 18 aa, Artificial Sequence
  Cyclic GFR-binding peptide
VVNKNEDFFLISLSSMKE

SEQ ID NO: 6773 - protein, 13 aa, Artificial Sequence
  Cyclic GFR-binding peptide
FFLVSLSSLQTPA

SEQ ID NO: 6774 - protein, 17 aa, Artificial Sequence
  Cyclic GFR-binding peptide
IKPTKGILFFISLSSLD

SEQ ID NO: 6775 - protein, 16 aa, Artificial Sequence
  Cyclic GFR-binding peptide
IIQQKDNFFLMSLSSM

SEQ ID NO: 6776 - protein, 16 aa, Artificial Sequence
  Cyclic GFR-binding peptide
  MOD_RES (14)..(15): Xaa is C or S
FFLMSLSSMKTPTXXP

SEQ ID NO: 6777 - protein, 13 aa, Artificial Sequence
  Cyclic GFR-binding peptide
FFLISLSSLKTPV

SEQ ID NO: 6778 - protein, 17 aa, Artificial Sequence
  Cyclic GFR-binding peptide
  MOD_RES (14)..(15): Xaa is C or S
FFLVSLSSLKTPAXXAK

SEQ ID NO: 6779 - protein, 27 aa, Artificial Sequence
  Cyclic GFR-binding peptide
  MOD_RES (21)..(22): Xaa is C or S
TPVGMDDFFLVSLSSLKTPVXXAKGVK

SEQ ID NO: 6780 - protein, 17 aa, Artificial Sequence
  Cyclic GFR-binding peptide
IVNSSDDFFLVSLSSLK

SEQ ID NO: 6781 - protein, 19 aa, Artificial Sequence
  Cyclic GFR-binding peptide
  MOD_RES (14)..(15): Xaa is C or S
FFLISLSSLDQSVXXPSAS

SEQ ID NO: 6782 - protein, 27 aa, Artificial Sequence
  Cyclic GFR-binding peptide
  MOD_RES (21)..(22): Xaa is C or S
VVKENEDFFLMSLSSLETPVXXAKPIK

SEQ ID NO: 6783 - protein, 17 aa, Artificial Sequence
  Cyclic GFR-binding peptide
LLVRGNDFFLMSLSSTK

SEQ ID NO: 6784 - protein, 16 aa, Artificial Sequence
  Cyclic GFR-binding peptide
VVKENEDFFLMSLSSL

SEQ ID NO: 6785 - protein, 20 aa, Artificial Sequence
  Cyclic GFR-binding peptide
  MOD_RES (14)..(14): Xaa is C or S
FFLMSLSSEETPVXELGEDN

SEQ ID NO: 6786 - protein, 17 aa, Artificial Sequence
  Cyclic GFR-binding peptide
  MOD_RES (16)..(16): Xaa is C or S
FFLVSLSSHHVRSPQXK

SEQ ID NO: 6787 - protein, 19 aa, Artificial Sequence
  Cyclic GFR-binding peptide
IIQQKDNFFLMSLSSMKTP

SEQ ID NO: 6788 - protein, 19 aa, Artificial Sequence
  Cyclic GFR-binding peptide
LKPKKRVYEFFLVSLSSHH

SEQ ID NO: 6789 - protein, 27 aa, Artificial Sequence
  Cyclic GFR-binding peptide
  MOD_RES (21)..(22): Xaa is C or S
VVNNAADFFLISLSSLRAPVXXSAPAA

SEQ ID NO: 6790 - protein, 15 aa, Artificial Sequence
  Cyclic GFR-binding peptide
  MOD_RES (14)..(15): Xaa is C or S
FFLISLSSLRAPVXX

SEQ ID NO: 6791 - protein, 13 aa, Artificial Sequence
  Cyclic GFR-binding peptide
FFLISLSSLRTPV

SEQ ID NO: 6792 - protein, 15 aa, Artificial Sequence
  Cyclic GFR-binding peptide
  MOD_RES (14)..(15): Xaa is C or S
FFLMSLSSLETPVXX

SEQ ID NO: 6793 - protein, 13 aa, Artificial Sequence
  Cyclic GFR-binding peptide
FFLISLSSLAQPV

SEQ ID NO: 6794 - protein, 17 aa, Artificial Sequence
  Cyclic GFR-binding peptide
LKPKKRVYEFFLVSLSS

SEQ ID NO: 6795 - protein, 19 aa, Artificial Sequence
  Cyclic GFR-binding peptide
HQGQHPKIRFFLMSLSSEE

SEQ ID NO: 6796 - protein, 15 aa, Artificial Sequence
  Cyclic GFR-binding peptide
IKPTKGILFFISLSS

SEQ ID NO: 6797 - protein, 19 aa, Artificial Sequence
  Cyclic GFR-binding peptide
  MOD_RES (14)..(15): Xaa is C or S
FFLISLSSMKEPVXXPEPI

SEQ ID NO: 6798 - protein, 19 aa, Artificial Sequence
  Cyclic GFR-binding peptide
VVKENEDFFLMSLSSLETP

SEQ ID NO: 6799 - protein, 27 aa, Artificial Sequence
  Cyclic GFR-binding peptide
  MOD_RES (21)..(22): Xaa is C or S
VVNNASDFFLISLSSLRTPVXXTPPTS

SEQ ID NO: 6800 - protein, 19 aa, Artificial Sequence
  Cyclic GFR-binding peptide
VKPKRGVLFFISLSSLAQP

SEQ ID NO: 6801 - protein, 27 aa, Artificial Sequence
  Cyclic GFR-binding peptide
  MOD_RES (21)..(22): Xaa is C or S
VKPTRGVLFFISLSSLDQPVXXPSASA

SEQ ID NO: 6802 - protein, 14 aa, Artificial Sequence
  Cyclic GFR-binding peptide
  MOD_RES (14)..(14): Xaa is C or S
FFLISLSSMKEPVX

SEQ ID NO: 6803 - protein, 18 aa, Artificial Sequence
  Cyclic GFR-binding peptide
  MOD_RES (14)..(15): Xaa is C or S
FFLISLSSLRAPVXXSAP

SEQ ID NO: 6804 - protein, 18 aa, Artificial Sequence
  Cyclic GFR-binding peptide
  MOD_RES (14)..(15): Xaa is C or S
FFLISLSSMKEPVXXPEP

SEQ ID NO: 6805 - protein, 16 aa, Artificial Sequence
  Cyclic GFR-binding peptide
  MOD_RES (16)..(16): Xaa is C or S
FFLVSLSSHHVRSPQX

SEQ ID NO: 6806 - protein, 18 aa, Artificial Sequence
  Cyclic GFR-binding peptide
  MOD_RES (14)..(15): Xaa is C or S
FFLMSLSSMKTPTXXPGA

SEQ ID NO: 6807 - protein, 20 aa, Artificial Sequence
  Cyclic GFR-binding peptide
  MOD_RES (14)..(15): Xaa is C or S
FFLISLSSLRTPVXXTPPTS

SEQ ID NO: 6808 - protein, 16 aa, Artificial Sequence
  Cyclic GFR-binding peptide
VKPKRGVLFFISLSSL

SEQ ID NO: 6809 - protein, 14 aa, Artificial Sequence
  Cyclic GFR-binding peptide
  MOD_RES (14)..(14): Xaa is C or S
FFLMSLSSTKVPAX

SEQ ID NO: 6810 - protein, 18 aa, Artificial Sequence
  Cyclic GFR-binding peptide
YTVVGKDFFLISLSSLKT

SEQ ID NO: 6811 - protein, 16 aa, Artificial Sequence
  Cyclic GFR-binding peptide
VVKDYEDFFLMSLSSL

SEQ ID NO: 6812 - protein, 27 aa, Artificial Sequence
  Cyclic GFR-binding peptide
  MOD_RES (21)..(22): Xaa is C or S
IVNSSDDFFLVSLSSLKTPAXXPKPVH

SEQ ID NO: 6813 - protein, 17 aa, Artificial Sequence
  Cyclic GFR-binding peptide
IVNSSDDFFLVSLSSLQ

SEQ ID NO: 6814 - protein, 17 aa, Artificial Sequence
  Cyclic GFR-binding peptide
YTVVGKDFFLISLSSLK

SEQ ID NO: 6815 - protein, 18 aa, Artificial Sequence
  Cyclic GFR-binding peptide
IVNSSDDFFLVSLSSLKT

SEQ ID NO: 6816 - protein, 14 aa, Artificial Sequence
  Cyclic GFR-binding peptide
  MOD_RES (14)..(14): Xaa is C or S
FFLVSLSSLKTPAX

SEQ ID NO: 6817 - protein, 19 aa, Artificial Sequence
  Cyclic GFR-binding peptide
  MOD_RES (14)..(15): Xaa is C or S
FFLVSLSSLKTPAXXPKPV

SEQ ID NO: 6818 - protein, 19 aa, Artificial Sequence
  Cyclic GFR-binding peptide
  MOD_RES (14)..(15): Xaa is C or S
FFLISLSSLRTPVXXTPPT

SEQ ID NO: 6819 - protein, 17 aa, Artificial Sequence
  Cyclic GFR-binding peptide
  MOD_RES (14)..(15): Xaa is C or S
FFLISLSSLDQPVXXPS

SEQ ID NO: 6820 - protein, 17 aa, Artificial Sequence
  Cyclic GFR-binding peptide
VVKDYEDFFLMSLSSLE

SEQ ID NO: 6821 - protein, 15 aa, Artificial Sequence
  Cyclic GFR-binding peptide
VVNNAADFFLISLSS

SEQ ID NO: 6822 - protein, 27 aa, Artificial Sequence
  Cyclic GFR-binding peptide
  MOD_RES (21)..(22): Xaa is C or S
IVNSSDDFFLVSLSSLQTPAXXPKPVT

SEQ ID NO: 6823 - protein, 27 aa, Artificial Sequence
  Cyclic GFR-binding peptide
  MOD_RES (21)..(22): Xaa is C or S
LLVRGNDFFLMSLSSTKVPAXXTSPVR

SEQ ID NO: 6824 - protein, 18 aa, Artificial Sequence
  Cyclic GFR-binding peptide
  MOD_RES (16)..(16): Xaa is C or S
FFLVSLSSHHVRSPQXKV

SEQ ID NO: 6825 - protein, 19 aa, Artificial Sequence
  Cyclic GFR-binding peptide
  MOD_RES (14)..(15): Xaa is C or S
FFLVSLSSLKTPVXXAKGV

SEQ ID NO: 6826 - protein, 15 aa, Artificial Sequence
  Cyclic GFR-binding peptide
VVNNASDFFLISLSS

SEQ ID NO: 6827 - protein, 20 aa, Artificial Sequence
  Cyclic GFR-binding peptide
  MOD_RES (14)..(15): Xaa is C or S
FFLMSLSSTKVPAXXTSPVR

SEQ ID NO: 6828 - protein, 18 aa, Artificial Sequence
  Cyclic GFR-binding peptide
IVNSSDDFFLVSLSSLQT

SEQ ID NO: 6829 - protein, 16 aa, Artificial Sequence
  Cyclic GFR-binding peptide
  MOD_RES (14)..(15): Xaa is C or S
FFLISLSSLAQPVXXP

SEQ ID NO: 6830 - protein, 29 aa, Artificial Sequence
  Cyclic GFR-binding peptide
  MOD_RES (25)..(25): Xaa is C or S
LKPKKRVYEFFLVSLSSHHVRSPQXKVSS

SEQ ID NO: 6831 - protein, 17 aa, Artificial Sequence
  Cyclic GFR-binding peptide
IVNNSSDFFLVSLSSLK

SEQ ID NO: 6832 - protein, 16 aa, Artificial Sequence
  Cyclic GFR-binding peptide
  MOD_RES (14)..(15): Xaa is C or S
FFLVSLSSLQTPAXXP

SEQ ID NO: 6833 - protein, 19 aa, Artificial Sequence
  Cyclic GFR-binding peptide
TPVGMDDFFLVSLSSLKTP

SEQ ID NO: 6834 - protein, 15 aa, Artificial Sequence
  Cyclic GFR-binding peptide
  MOD_RES (14)..(15): Xaa is C or S
FFLISLSSLDQPVXX

SEQ ID NO: 6835 - protein, 27 aa, Artificial Sequence
  Cyclic GFR-binding peptide
  MOD_RES (21)..(22): Xaa is C or S
IVNSSDDFFLVSLSSLKTPAXXPKPVY

SEQ ID NO: 6836 - protein, 17 aa, Artificial Sequence
  Cyclic GFR-binding peptide
  MOD_RES (14)..(15): Xaa is C or S
FFLVSLSSLKTPVXXAK

SEQ ID NO: 6837 - protein, 20 aa, Artificial Sequence
  Cyclic GFR-binding peptide
  MOD_RES (14)..(15): Xaa is C or S
FFLVSLSSLKTPAXXAKPVA

SEQ ID NO: 6838 - protein, 18 aa, Artificial Sequence
  Cyclic GFR-binding peptide
VVKDYEDFFLMSLSSLET

SEQ ID NO: 6839 - protein, 18 aa, Artificial Sequence
  Cyclic GFR-binding peptide
IVNNSSDFFLVSLSSLKT

SEQ ID NO: 6840 - protein, 19 aa, Artificial Sequence
  Cyclic GFR-binding peptide
VVNNASDFFLISLSSLRTP

SEQ ID NO: 6841 - protein, 20 aa, Artificial Sequence
  Cyclic GFR-binding peptide
  MOD_RES (14)..(15): Xaa is C or S
FFLVSLSSLKTPAXXPKPVH

SEQ ID NO: 6842 - protein, 13 aa, Artificial Sequence
  Cyclic GFR-binding peptide
FFLISLSSLRAPV

SEQ ID NO: 6843 - protein, 19 aa, Artificial Sequence
  Cyclic GFR-binding peptide
IVNSSDDFFLVSLSSLQTP

SEQ ID NO: 6844 - protein, 20 aa, Artificial Sequence
  Cyclic GFR-binding peptide
  MOD_RES (14)..(15): Xaa is C or S
FFLMSLSSMKTPTXXPGASG

SEQ ID NO: 6845 - protein, 18 aa, Artificial Sequence
  Cyclic GFR-binding peptide
VVNNAADFFLISLSSLRA

SEQ ID NO: 6846 - protein, 13 aa, Artificial Sequence
  Cyclic GFR-binding peptide
FFLMSLSSLETPV

SEQ ID NO: 6847 - protein, 16 aa, Artificial Sequence
  Cyclic GFR-binding peptide
  MOD_RES (14)..(15): Xaa is C or S
FFLISLSSLKTPVXXA

SEQ ID NO: 6848 - protein, 18 aa, Artificial Sequence
  Cyclic GFR-binding peptide
LKPKKRVYEFFLVSLSSH

SEQ ID NO: 6849 - protein, 19 aa, Artificial Sequence
  Cyclic GFR-binding peptide
VVKDYEDFFLMSLSSLETP

SEQ ID NO: 6850 - protein, 17 aa, Artificial Sequence
  Cyclic GFR-binding peptide
  MOD_RES (14)..(15): Xaa is C or S
FFLISLSSLAQPVXXPA

SEQ ID NO: 6851 - protein, 16 aa, Artificial Sequence
  Cyclic GFR-binding peptide
LLVRGNDFFLMSLSST

SEQ ID NO: 6852 - protein, 16 aa, Artificial Sequence
  Cyclic GFR-binding peptide
IVNSSDDFFLVSLSSL

SEQ ID NO: 6853 - protein, 15 aa, Artificial Sequence
  Cyclic GFR-binding peptide
  MOD_RES (14)..(15): Xaa is C or S
FFLVSLSSLKTPVXX

SEQ ID NO: 6854 - protein, 16 aa, Artificial Sequence
  Cyclic GFR-binding peptide
  MOD_RES (14)..(14): Xaa is C or S
FFLVSLSSLKTPAXTP

SEQ ID NO: 6855 - protein, 15 aa, Artificial Sequence
  Cyclic GFR-binding peptide
  MOD_RES (14)..(15): Xaa is C or S
FFLISLSSMKEPVXX

SEQ ID NO: 6856 - protein, 15 aa, Artificial Sequence
  Cyclic GFR-binding peptide
IVNNSSDFFLVSLSS

SEQ ID NO: 6857 - protein, 14 aa, Artificial Sequence
  Cyclic GFR-binding peptide
  MOD_RES (14)..(14): Xaa is C or S
FFLISLSSLDQSVX

SEQ ID NO: 6858 - protein, 13 aa, Artificial Sequence
  Cyclic GFR-binding peptide
FFLISLSSLDQSV

SEQ ID NO: 6859 - protein, 16 aa, Artificial Sequence
  Cyclic GFR-binding peptide
VKPTRGVLFFISLSSL

SEQ ID NO: 6860 - protein, 19 aa, Artificial Sequence
  Cyclic GFR-binding peptide
  MOD_RES (14)..(15): Xaa is C or S
FFLISLSSLRAPVXXSAPA

SEQ ID NO: 6861 - protein, 21 aa, Artificial Sequence
  Cyclic GFR-binding peptide
HQGQHPKIRFFLMSLSSEETP

SEQ ID NO: 6862 - protein, 17 aa, Artificial Sequence
  Cyclic GFR-binding peptide
VVKENEDFFLMSLSSLE

SEQ ID NO: 6863 - protein, 17 aa, Artificial Sequence
  Cyclic GFR-binding peptide
HQGQHPKIRFFLMSLSS

SEQ ID NO: 6864 - protein, 16 aa, Artificial Sequence
  Cyclic GFR-binding peptide
  MOD_RES (14)..(15): Xaa is C or S
FFLVSLSSLKTPAXXA

SEQ ID NO: 6865 - protein, 17 aa, Artificial Sequence
  Cyclic GFR-binding peptide
  MOD_RES (14)..(15): Xaa is C or S
FFLMSLSSLETPVXXAK

SEQ ID NO: 6866 - protein, 16 aa, Artificial Sequence
  Cyclic GFR-binding peptide
  MOD_RES (14)..(15): Xaa is C or S
FFLISLSSLDQPVXXP

SEQ ID NO: 6867 - protein, 18 aa, Artificial Sequence
  Cyclic GFR-binding peptide
  MOD_RES (14)..(15): Xaa is C or S
FFLISLSSLDQPVXXPSA

SEQ ID NO: 6868 - protein, 20 aa, Artificial Sequence
  Cyclic GFR-binding peptide
  MOD_RES (14)..(15): Xaa is C or S
FFLVSLSSLKTPVXXAKGVK

SEQ ID NO: 6869 - protein, 19 aa, Artificial Sequence
  Cyclic GFR-binding peptide
  MOD_RES (14)..(15): Xaa is C or S
FFLMSLSSTKVPAXXTSPV

SEQ ID NO: 6870 - protein, 15 aa, Artificial Sequence
  Cyclic GFR-binding peptide
  MOD_RES (14)..(15): Xaa is C or S
FFLISLSSLAQPVXX

SEQ ID NO: 6871 - protein, 20 aa, Artificial Sequence
  Cyclic GFR-binding peptide
  MOD_RES (14)..(15): Xaa is C or S
FFLISLSSLDQSVXXPSASA

SEQ ID NO: 6872 - protein, 18 aa, Artificial Sequence
  Cyclic GFR-binding peptide
  MOD_RES (14)..(15): Xaa is C or S
FFLVSLSSLKTPVXXAKG

SEQ ID NO: 6873 - protein, 17 aa, Artificial Sequence
  Cyclic GFR-binding peptide
VKPKRGVLFFISLSSLA

SEQ ID NO: 6874 - protein, 13 aa, Artificial Sequence
  Cyclic GFR-binding peptide
FFLMSLSSMKTPT

SEQ ID NO: 6875 - protein, 16 aa, Artificial Sequence
  Cyclic GFR-binding peptide
VVNNAADFFLISLSSL

SEQ ID NO: 6876 - protein, 17 aa, Artificial Sequence
  Cyclic GFR-binding peptide
  MOD_RES (14)..(15): Xaa is C or S
FFLMSLSSMKTPTXXPG

SEQ ID NO: 6877 - protein, 14 aa, Artificial Sequence
  Cyclic GFR-binding peptide
  MOD_RES (14)..(14): Xaa is C or S
FFLMSLSSEETPVX

SEQ ID NO: 6878 - protein, 15 aa, Artificial Sequence
  Cyclic GFR-binding peptide
VKPTRGVLFFISLSS

SEQ ID NO: 6879 - protein, 27 aa, Artificial Sequence
  Cyclic GFR-binding peptide
  MOD_RES (21)..(22): Xaa is C or S
VKPKRGVLFFISLSSLAQPVXXPAASA

SEQ ID NO: 6880 - protein, 17 aa, Artificial Sequence
  Cyclic GFR-binding peptide
TPVGMDDFFLVSLSSLK

SEQ ID NO: 6881 - protein, 14 aa, Artificial Sequence
  Cyclic GFR-binding peptide
  MOD_RES (14)..(14): Xaa is C or S
FFLISLSSLRTPVX

SEQ ID NO: 6882 - protein, 13 aa, Artificial Sequence
  Cyclic GFR-binding peptide
FFLVSLSSLKTPV

SEQ ID NO: 6883 - protein, 16 aa, Artificial Sequence
  Cyclic GFR-binding peptide
  MOD_RES (14)..(15): Xaa is C or S
FFLVSLSSLKTPAXXP

SEQ ID NO: 6884 - protein, 18 aa, Artificial Sequence
  Cyclic GFR-binding peptide
HQGQHPKIRFFLMSLSSE

SEQ ID NO: 6885 - protein, 13 aa, Artificial Sequence
  Cyclic GFR-binding peptide
FFLISLSSMKEPV

SEQ ID NO: 6886 - protein, 18 aa, Artificial Sequence
  Cyclic GFR-binding peptide
IKPTKGILFFISLSSLDQ

SEQ ID NO: 6887 - protein, 16 aa, Artificial Sequence
  Cyclic GFR-binding peptide
TPVGMDDFFLVSLSSL

SEQ ID NO: 6888 - protein, 15 aa, Artificial Sequence
  Cyclic GFR-binding peptide
VVKENEDFFLMSLSS

SEQ ID NO: 6889 - protein, 27 aa, Artificial Sequence
  Cyclic GFR-binding peptide
  MOD_RES (21)..(21): Xaa is C or S
IVNSSDDFFLVSLSSLKTPAXTPKTVH

SEQ ID NO: 6890 - protein, 20 aa, Artificial Sequence
  Cyclic GFR-binding peptide
HQGQHPKIRFFLMSLSSEET

SEQ ID NO: 6891 - protein, 27 aa, Artificial Sequence
  Cyclic GFR-binding peptide
  MOD_RES (21)..(22): Xaa is C or S
VVNKNEDFFLISLSSMKEPVXXPEPIG

SEQ ID NO: 6892 - protein, 18 aa, Artificial Sequence
  Cyclic GFR-binding peptide
TPVGMDDFFLVSLSSLKT

SEQ ID NO: 6893 - protein, 15 aa, Artificial Sequence
  Cyclic GFR-binding peptide
  MOD_RES (14)..(15): Xaa is C or S
FFLMSLSSMKTPTXX

SEQ ID NO: 6894 - protein, 27 aa, Artificial Sequence
  Cyclic GFR-binding peptide
  MOD_RES (21)..(22): Xaa is C or S
IKPTKGILFFISLSSLDQSVXXPSASA

SEQ ID NO: 6895 - protein, 14 aa, Artificial Sequence
  Cyclic GFR-binding peptide
  MOD_RES (14)..(14): Xaa is C or S
FFLVSLSSLQTPAX

SEQ ID NO: 6896 - protein, 16 aa, Artificial Sequence
  Cyclic GFR-binding peptide
VVNKNEDFFLISLSSM

SEQ ID NO: 6897 - protein, 15 aa, Artificial Sequence
  Cyclic GFR-binding peptide
IIQQKDNFFLMSLSS

SEQ ID NO: 6898 - protein, 15 aa, Artificial Sequence
  Cyclic GFR-binding peptide
YTVVGKDFFLISLSS

SEQ ID NO: 6899 - protein, 14 aa, Artificial Sequence
  Cyclic GFR-binding peptide
  MOD_RES (14)..(14): Xaa is C or S
FFLISLSSLKTPVX

SEQ ID NO: 6900 - protein, 20 aa, Artificial Sequence
  Cyclic GFR-binding peptide
  MOD_RES (14)..(15): Xaa is C or S
FFLVSLSSLQTPAXXPKPVT

SEQ ID NO: 6901 - protein, 18 aa, Artificial Sequence
  Cyclic GFR-binding peptide
  MOD_RES (14)..(15): Xaa is C or S
FFLMSLSSLETPVXXAKP

SEQ ID NO: 6902 - protein, 18 aa, Artificial Sequence
  Cyclic GFR-binding peptide
  MOD_RES (14)..(15): Xaa is C or S
FFLISLSSLAQPVXXPAA

SEQ ID NO: 6903 - protein, 19 aa, Artificial Sequence
  Cyclic GFR-binding peptide
  MOD_RES (14)..(15): Xaa is C or S
FFLVSLSSLQTPAXXPKPV

SEQ ID NO: 6904 - protein, 16 aa, Artificial Sequence
  Cyclic GFR-binding peptide
VVNNASDFFLISLSSL

SEQ ID NO: 6905 - protein, 19 aa, Artificial Sequence
  Cyclic GFR-binding peptide
IVNSSDDFFLVSLSSLKTP

SEQ ID NO: 6906 - protein, 27 aa, Artificial Sequence
  Cyclic GFR-binding peptide
  MOD_RES (21)..(22): Xaa is C or S
IIQQKDNFFLMSLSSMKTPTXXPGASG

SEQ ID NO: 6907 - protein, 14 aa, Artificial Sequence
  Cyclic GFR-binding peptide
  MOD_RES (14)..(14): Xaa is C or S
FFLISLSSLAQPVX

SEQ ID NO: 6908 - protein, 20 aa, Artificial Sequence
  Cyclic GFR-binding peptide
  MOD_RES (14)..(14): Xaa is C or S
FFLVSLSSLKTPAXTPKTVH

SEQ ID NO: 6909 - protein, 15 aa, Artificial Sequence
  Cyclic GFR-binding peptide
FFLVSLSSHHVRSPQ

SEQ ID NO: 6910 - protein, 19 aa, Artificial Sequence
  Cyclic GFR-binding peptide
  MOD_RES (16)..(16): Xaa is C or S
FFLVSLSSHHVRSPQXKVS

SEQ ID NO: 6911 - protein, 19 aa, Artificial Sequence
  Cyclic GFR-binding peptide
IKPTKGILFFISLSSLDQS

SEQ ID NO: 6912 - protein, 17 aa, Artificial Sequence
  Cyclic GFR-binding peptide
  MOD_RES (14)..(14): Xaa is C or S
FFLMSLSSEETPVXELG

SEQ ID NO: 6913 - protein, 17 aa, Artificial Sequence
  Cyclic GFR-binding peptide
VVNKNEDFFLISLSSMK

SEQ ID NO: 6914 - protein, 20 aa, Artificial Sequence
  Cyclic GFR-binding peptide
  MOD_RES (14)..(15): Xaa is C or S
FFLISLSSMKEPVXXPEPIG

SEQ ID NO: 6915 - protein, 13 aa, Artificial Sequence
  Cyclic GFR-binding peptide
FFLVSLSSLKTPA

SEQ ID NO: 6916 - protein, 20 aa, Artificial Sequence
  Cyclic GFR-binding peptide
  MOD_RES (14)..(15): Xaa is C or S
FFLISLSSLRAPVXXSAPAA

SEQ ID NO: 6917 - protein, 27 aa, Artificial Sequence
  Cyclic GFR-binding peptide
  MOD_RES (21)..(22): Xaa is C or S
IVNNSSDFFLVSLSSLKTPAXXAKPVA

SEQ ID NO: 6918 - protein, 29 aa, Artificial Sequence
  Cyclic GFR-binding peptide
  MOD_RES (23)..(23): Xaa is C or S
HQGQHPKIRFFLMSLSSEETPVXELGEDN

SEQ ID NO: 6919 - protein, 27 aa, Artificial Sequence
  Cyclic GFR-binding peptide
  MOD_RES (21)..(22): Xaa is C or S
VVKDYEDFFLMSLSSLETPVXXAKPIS

SEQ ID NO: 6920 - protein, 19 aa, Artificial Sequence
  Cyclic GFR-binding peptide
  MOD_RES (14)..(15): Xaa is C or S
FFLVSLSSLKTPAXXAKPV

SEQ ID NO: 6921 - protein, 17 aa, Artificial Sequence
  Cyclic GFR-binding peptide
VVNNASDFFLISLSSLR

SEQ ID NO: 6922 - protein, 15 aa, Artificial Sequence
  Cyclic GFR-binding peptide
TPVGMDDFFLVSLSS

SEQ ID NO: 6923 - protein, 16 aa, Artificial Sequence
  Cyclic GFR-binding peptide
  MOD_RES (14)..(15): Xaa is C or S
FFLISLSSLRAPVXXS

SEQ ID NO: 6924 - protein, 18 aa, Artificial Sequence
  Cyclic GFR-binding peptide
VVKENEDFFLMSLSSLET

SEQ ID NO: 6925 - protein, 14 aa, Artificial Sequence
  Cyclic GFR-binding peptide
FFLVSLSSHHVRSP

SEQ ID NO: 6926 - protein, 17 aa, Artificial Sequence
  Cyclic GFR-binding peptide
  MOD_RES (14)..(15): Xaa is C or S
FFLISLSSLKTPVXXAK

SEQ ID NO: 6927 - protein, 27 aa, Artificial Sequence
  Cyclic GFR-binding peptide
  MOD_RES (21)..(22): Xaa is C or S
YTVVGKDFFLISLSSLKTPVXXAKSAK

SEQ ID NO: 6928 - protein, 14 aa, Artificial Sequence
  Cyclic GFR-binding peptide
  MOD_RES (14)..(14): Xaa is C or S
FFLMSLSSMKTPTX

SEQ ID NO: 6929 - protein, 19 aa, Artificial Sequence
  Cyclic GFR-binding peptide
VVNKNEDFFLISLSSMKEP

SEQ ID NO: 6930 - protein, 20 aa, Artificial Sequence
  Cyclic GFR-binding peptide
  MOD_RES (14)..(15): Xaa is C or S
FFLVSLSSLKTPAXXPKPVY

SEQ ID NO: 6931 - protein, 19 aa, Artificial Sequence
  Cyclic GFR-binding peptide
  MOD_RES (14)..(15): Xaa is C or S
FFLISLSSLDQPVXXPSAS

SEQ ID NO: 6932 - protein, 18 aa, Artificial Sequence
  Cyclic GFR-binding peptide
VKPKRGVLFFISLSSLAQ

SEQ ID NO: 6933 - protein, 16 aa, Artificial Sequence
  Cyclic GFR-binding peptide
IKPTKGILFFISLSSL

SEQ ID NO: 6934 - protein, 18 aa, Artificial Sequence
  Cyclic GFR-binding peptide
  MOD_RES (14)..(14): Xaa is C or S
FFLMSLSSEETPVXELGE

SEQ ID NO: 6935 - protein, 17 aa, Artificial Sequence
  Cyclic GFR-binding peptide
  MOD_RES (14)..(15): Xaa is C or S
FFLISLSSLRTPVXXTP

SEQ ID NO: 6936 - protein, 16 aa, Artificial Sequence
  Cyclic GFR-binding peptide
  MOD_RES (14)..(14): Xaa is C or S
FFLMSLSSEETPVXEL

SEQ ID NO: 6937 - protein, 16 aa, Artificial Sequence
  Cyclic GFR-binding peptide
  MOD_RES (14)..(15): Xaa is C or S
FFLMSLSSLETPVXXA

SEQ ID NO: 6938 - protein, 15 aa, Artificial Sequence
  Cyclic GFR-binding peptide
  MOD_RES (14)..(15): Xaa is C or S
FFLISLSSLDQSVXX

SEQ ID NO: 6939 - protein, 20 aa, Artificial Sequence
  Cyclic GFR-binding peptide
  MOD_RES (14)..(15): Xaa is C or S
FFLISLSSLKTPVXXAKSAK

SEQ ID NO: 6940 - protein, 17 aa, Artificial Sequence
  Cyclic GFR-binding peptide
  MOD_RES (14)..(14): Xaa is C or S
FFLVSLSSLKTPAXTPK

SEQ ID NO: 6941 - protein, 19 aa, Artificial Sequence
  Cyclic GFR-binding peptide
  MOD_RES (14)..(15): Xaa is C or S
FFLMSLSSLETPVXXAKPI

SEQ ID NO: 6942 - protein, 17 aa, Artificial Sequence
  Cyclic GFR-binding peptide
  MOD_RES (14)..(15): Xaa is C or S
FFLISLSSLRAPVXXSA

SEQ ID NO: 6943 - protein, 18 aa, Artificial Sequence
  Cyclic GFR-binding peptide
LLVRGNDFFLMSLSSTKV

SEQ ID NO: 6944 - protein, 19 aa, Artificial Sequence
  Cyclic GFR-binding peptide
  MOD_RES (14)..(14): Xaa is C or S
FFLMSLSSEETPVXELGED

SEQ ID NO: 6945 - protein, 13 aa, Artificial Sequence
  Cyclic GFR-binding peptide
FFLMSLSSEETPV

SEQ ID NO: 6946 - protein, 17 aa, Artificial Sequence
  Cyclic GFR-binding peptide
  MOD_RES (14)..(15): Xaa is C or S
FFLVSLSSLKTPAXXPK

SEQ ID NO: 6947 - protein, 18 aa, Artificial Sequence
  Cyclic GFR-binding peptide
  MOD_RES (14)..(15): Xaa is C or S
FFLVSLSSLKTPAXXAKP

SEQ ID NO: 6948 - protein, 19 aa, Artificial Sequence
  Cyclic GFR-binding peptide
  MOD_RES (14)..(15): Xaa is C or S
FFLISLSSLAQPVXXPAAS

SEQ ID NO: 6949 - protein, 20 aa, Artificial Sequence
  Cyclic GFR-binding peptide
  MOD_RES (14)..(15): Xaa is C or S
FFLISLSSLDQPVXXPSASA

SEQ ID NO: 6950 - protein, 19 aa, Artificial Sequence
  Cyclic GFR-binding peptide
  MOD_RES (14)..(15): Xaa is C or S
FFLISLSSLKTPVXXAKSA

SEQ ID NO: 6951 - protein, 15 aa, Artificial Sequence
  Cyclic GFR-binding peptide
  MOD_RES (14)..(14): Xaa is C or S
FFLMSLSSEETPVXE

SEQ ID NO: 6952 - protein, 16 aa, Artificial Sequence
  Cyclic GFR-binding peptide
YTVVGKDFFLISLSSL

SEQ ID NO: 6953 - protein, 14 aa, Artificial Sequence
  Cyclic GFR-binding peptide
  MOD_RES (14)..(14): Xaa is C or S
FFLISLSSLRAPVX

SEQ ID NO: 6954 - protein, 15 aa, Artificial Sequence
  Cyclic GFR-binding peptide
  MOD_RES (14)..(14): Xaa is C or S
FFLVSLSSLKTPAXT

SEQ ID NO: 6955 - protein, 13 aa, Artificial Sequence
  Cyclic GFR-binding peptide
FFLISLSSLDQPV

SEQ ID NO: 6956 - protein, 19 aa, Artificial Sequence
  Cyclic GFR-binding peptide
  MOD_RES (14)..(15): Xaa is C or S
FFLMSLSSMKTPTXXPGAS

SEQ ID NO: 6957 - protein, 19 aa, Artificial Sequence
  Cyclic GFR-binding peptide
VKPTRGVLFFISLSSLDQP

SEQ ID NO: 6958 - protein, 15 aa, Artificial Sequence
  Cyclic GFR-binding peptide
  MOD_RES (14)..(15): Xaa is C or S
FFLISLSSLRTPVXX

SEQ ID NO: 6959 - protein, 13 aa, Artificial Sequence
  Cyclic GFR-binding peptide
FFLVSLSSHHVRS

SEQ ID NO: 6960 - protein, 14 aa, Artificial Sequence
  Cyclic GFR-binding peptide
  MOD_RES (14)..(14): Xaa is C or S
FFLISLSSLDQPVX

SEQ ID NO: 6961 - protein, 18 aa, Artificial Sequence
  Cyclic GFR-binding peptide
  MOD_RES (14)..(15): Xaa is C or S
FFLVSLSSLKTPAXXPKP

SEQ ID NO: 6962 - protein, 18 aa, Artificial Sequence
  Cyclic GFR-binding peptide
VKPTRGVLFFISLSSLDQ

SEQ ID NO: 6963 - protein, 16 aa, Artificial Sequence
  Cyclic GFR-binding peptide
  MOD_RES (14)..(15): Xaa is C or S
FFLISLSSMKEPVXXP

SEQ ID NO: 6964 - protein, 20 aa, Artificial Sequence
  Cyclic GFR-binding peptide
LKPKKRVYEFFLVSLSSHHV

SEQ ID NO: 6965 - protein, 16 aa, Artificial Sequence
  Cyclic GFR-binding peptide
IVNNSSDFFLVSLSSL

SEQ ID NO: 6966 - protein, 15 aa, Artificial Sequence
  Cyclic GFR-binding peptide
VKPKRGVLFFISLSS

SEQ ID NO: 6967 - protein, 19 aa, Artificial Sequence
  Cyclic GFR-binding peptide
LLVRGNDFFLMSLSSTKVP

SEQ ID NO: 6968 - protein, 15 aa, Artificial Sequence
  Cyclic GFR-binding peptide
  MOD_RES (14)..(15): Xaa is C or S
FFLISLSSLKTPVXX

SEQ ID NO: 6969 - protein, 15 aa, Artificial Sequence
  Cyclic GFR-binding peptide
  MOD_RES (14)..(15): Xaa is C or S
FFLVSLSSLKTPAXX

SEQ ID NO: 6970 - protein, 17 aa, Artificial Sequence
  Cyclic GFR-binding peptide
VVNNAADFFLISLSSLR

SEQ ID NO: 6971 - protein, 17 aa, Artificial Sequence
  Cyclic GFR-binding peptide
  MOD_RES (14)..(15): Xaa is C or S
FFLISLSSLDQSVXXPS

SEQ ID NO: 6972 - protein, 19 aa, Artificial Sequence
  Cyclic GFR-binding peptide
VVNNAADFFLISLSSLRAP

SEQ ID NO: 6973 - protein, 17 aa, Artificial Sequence
  Cyclic GFR-binding peptide
  MOD_RES (14)..(15): Xaa is C or S
FFLMSLSSTKVPAXXTS

SEQ ID NO: 6974 - protein, 18 aa, Artificial Sequence
  Cyclic GFR-binding peptide
  MOD_RES (14)..(15): Xaa is C or S
FFLVSLSSLQTPAXXPKP

SEQ ID NO: 6975 - protein, 15 aa, Artificial Sequence
  Cyclic GFR-binding peptide
  MOD_RES (14)..(15): Xaa is C or S
FFLVSLSSLQTPAXX

SEQ ID NO: 6976 - protein, 18 aa, Artificial Sequence
  Cyclic GFR-binding peptide
VVNNASDFFLISLSSLRT

SEQ ID NO: 6977 - protein, 20 aa, Artificial Sequence
  Cyclic GFR-binding peptide
  MOD_RES (14)..(15): Xaa is C or S
FFLMSLSSLETPVXXAKPIK

SEQ ID NO: 6978 - protein, 19 aa, Artificial Sequence
  Cyclic GFR-binding peptide
  MOD_RES (14)..(14): Xaa is C or S
FFLVSLSSLKTPAXTPKTV

SEQ ID NO: 6979 - protein, 20 aa, Artificial Sequence
  Cyclic GFR-binding peptide
  MOD_RES (14)..(15): Xaa is C or S
FFLISLSSLAQPVXXPAASA

SEQ ID NO: 6980 - protein, 15 aa, Artificial Sequence
  Cyclic GFR-binding peptide
VVNKNEDFFLISLSS

SEQ ID NO: 6981 - protein, 15 aa, Artificial Sequence
  Cyclic GFR-binding peptide
VVKDYEDFFLMSLSS

SEQ ID NO: 6982 - protein, 19 aa, Artificial Sequence
  Cyclic GFR-binding peptide
YTVVGKDFFLISLSSLKTP

SEQ ID NO: 6983 - protein, 21 aa, Artificial Sequence
  Cyclic GFR-binding peptide
LKPKKRVYEFFLVSLSSHHVR

SEQ ID NO: 6984 - protein, 16 aa, Artificial Sequence
  Cyclic GFR-binding peptide
  MOD_RES (14)..(15): Xaa is C or S
FFLISLSSLRTPVXXT

SEQ ID NO: 6985 - protein, 13 aa, Artificial Sequence
  Cyclic GFR-binding peptide
FFLMSLSSTKVPA

SEQ ID NO: 6986 - protein, 14 aa, Artificial Sequence
  Cyclic GFR-binding peptide
  MOD_RES (14)..(14): Xaa is C or S
FFLVSLSSLKTPVX

SEQ ID NO: 6987 - protein, 16 aa, Artificial Sequence
  Cyclic GFR-binding peptide
  MOD_RES (14)..(15): Xaa is C or S
FFLVSLSSLKTPVXXA

SEQ ID NO: 6988 - protein, 15 aa, Artificial Sequence
  Cyclic GFR-binding peptide
IVNSSDDFFLVSLSS

SEQ ID NO: 6989 - protein, 17 aa, Artificial Sequence
  Cyclic GFR-binding peptide
VKPTRGVLFFISLSSLD

SEQ ID NO: 6990 - protein, 20 aa, Artificial Sequence
  Cyclic GFR-binding peptide
  MOD_RES (16)..(16): Xaa is C or S
FFLVSLSSHHVRSPQXKVSS

SEQ ID NO: 6991 - protein, 15 aa, Artificial Sequence
  Cyclic GFR-binding peptide
LLVRGNDFFLMSLSS

SEQ ID NO: 6992 - protein, 18 aa, Artificial Sequence
  Cyclic GFR-binding peptide
  MOD_RES (14)..(15): Xaa is C or S
FFLMSLSSTKVPAXXTSP

SEQ ID NO: 6993 - protein, 16 aa, Artificial Sequence
  Cyclic GFR-binding peptide
  MOD_RES (14)..(15): Xaa is C or S
FFLISLSSLDQSVXXP

SEQ ID NO: 6994 - protein, 18 aa, Artificial Sequence
  Cyclic GFR-binding peptide
IIQQKDNFFLMSLSSMKT

SEQ ID NO: 6995 - protein, 17 aa, Artificial Sequence
  Cyclic GFR-binding peptide
  MOD_RES (14)..(15): Xaa is C or S
FFLISLSSMKEPVXXPE

SEQ ID NO: 6996 - protein, 15 aa, Artificial Sequence
  Cyclic GFR-binding peptide
  MOD_RES (14)..(15): Xaa is C or S
FFLMSLSSTKVPAXX

SEQ ID NO: 6997 - protein, 19 aa, Artificial Sequence
  Cyclic GFR-binding peptide
IVNNSSDFFLVSLSSLKTP

SEQ ID NO: 6998 - protein, 18 aa, Artificial Sequence
  Cyclic GFR-binding peptide
  MOD_RES (14)..(15): Xaa is C or S
FFLISLSSLKTPVXXAKS

SEQ ID NO: 6999 - protein, 18 aa, Artificial Sequence
  Cyclic GFR-binding peptide
  MOD_RES (14)..(14): Xaa is C or S
FFLVSLSSLKTPAXTPKT

SEQ ID NO: 7000 - protein, 16 aa, Artificial Sequence
  Cyclic GFR-binding peptide
  MOD_RES (14)..(15): Xaa is C or S
FFLMSLSSTKVPAXXT

SEQ ID NO: 7001 - protein, 17 aa, Artificial Sequence
  Cyclic GFR-binding peptide
IIQQKDNFFLMSLSSMK

SEQ ID NO: 7002 - protein, 18 aa, Artificial Sequence
  Cyclic GFR-binding peptide
  MOD_RES (14)..(15): Xaa is C or S
FFLISLSSLRTPVXXTPP

SEQ ID NO: 7003 - protein, 18 aa, Artificial Sequence
  Cyclic GFR-binding peptide
  MOD_RES (14)..(15): Xaa is C or S
FFLISLSSLDQSVXXPSA

SEQ ID NO: 7004 - protein, 17 aa, Artificial Sequence
  Cyclic GFR-binding peptide
  MOD_RES (14)..(15): Xaa is C or S
FFLVSLSSLQTPAXXPK

SEQ ID NO: 7005 - protein, 14 aa, Artificial Sequence
  Cyclic GFR-binding peptide
  MOD_RES (14)..(14): Xaa is C or S
FFLMSLSSLETPVX

SEQ ID NO: 7006 - protein, 18 aa, Artificial Sequence
  Cyclic GFR-binding peptide
EKMSSLSILFFDENKNVV

SEQ ID NO: 7007 - protein, 13 aa, Artificial Sequence
  Cyclic GFR-binding peptide
APTQLSSLSVLFF

SEQ ID NO: 7008 - protein, 17 aa, Artificial Sequence
  Cyclic GFR-binding peptide
DLSSLSILFFIGKTPKI

SEQ ID NO: 7009 - protein, 16 aa, Artificial Sequence
  Cyclic GFR-binding peptide
MSSLSMLFFNDKQQII

SEQ ID NO: 7010 - protein, 16 aa, Artificial Sequence
  Cyclic GFR-binding peptide
  MOD_RES (2)..(3): Xaa is C or S
PXXTPTKMSSLSMLFF

SEQ ID NO: 7011 - protein, 13 aa, Artificial Sequence
  Cyclic GFR-binding peptide
VPTKLSSLSILFF

SEQ ID NO: 7012 - protein, 17 aa, Artificial Sequence
  Cyclic GFR-binding peptide
  MOD_RES (3)..(4): Xaa is C or S
KAXXAPTKLSSLSVLFF

SEQ ID NO: 7013 - protein, 27 aa, Artificial Sequence
  Cyclic GFR-binding peptide
  MOD_RES (6)..(7): Xaa is C or S
KVGKAXXVPTKLSSLSVLFFDDMGVPT

SEQ ID NO: 7014 - protein, 17 aa, Artificial Sequence
  Cyclic GFR-binding peptide
KLSSLSVLFFDDSSNVI

SEQ ID NO: 7015 - protein, 19 aa, Artificial Sequence
  Cyclic GFR-binding peptide
  MOD_RES (5)..(6): Xaa is C or S
SASPXXVSQDLSSLSILFF

SEQ ID NO: 7016 - protein, 17 aa, Artificial Sequence
  Cyclic GFR-binding peptide
KTSSLSMLFFDNGRVLL

SEQ ID NO: 7017 - protein, 20 aa, Artificial Sequence
  Cyclic GFR-binding peptide
  MOD_RES (7)..(7): Xaa is C or S
NDEGLEXVPTEESSLSMLFF

SEQ ID NO: 7018 - protein, 17 aa, Artificial Sequence
  Cyclic GFR-binding peptide
  MOD_RES (2)..(2): Xaa is C or S
KXQPSRVHHSSLSVLFF

SEQ ID NO: 7019 - protein, 19 aa, Artificial Sequence
  Cyclic GFR-binding peptide
PTKMSSLSMLFFNDKQQII

SEQ ID NO: 7020 - protein, 19 aa, Artificial Sequence
  Cyclic GFR-binding peptide
HHSSLSVLFFEYVRKKPKL

SEQ ID NO: 7021 - protein, 27 aa, Artificial Sequence
  Cyclic GFR-binding peptide
  MOD_RES (6)..(7): Xaa is C or S
AAPASXXVPARLSSLSILFFDAANNVV

SEQ ID NO: 7022 - protein, 15 aa, Artificial Sequence
  Cyclic GFR-binding peptide
  MOD_RES (1)..(2): Xaa is C or S
XXVPARLSSLSILFF

SEQ ID NO: 7023 - protein, 13 aa, Artificial Sequence
  Cyclic GFR-binding peptide
VPTRLSSLSILFF

SEQ ID NO: 7024 - protein, 13 aa, Artificial Sequence
  Cyclic GFR-binding peptide
VPQALSSLSILFF

SEQ ID NO: 7025 - protein, 17 aa, Artificial Sequence
  Cyclic GFR-binding peptide
SSLSVLFFEYVRKKPKL

SEQ ID NO: 7026 - protein, 19 aa, Artificial Sequence
  Cyclic GFR-binding peptide
EESSLSMLFFRIKPHQGQH

SEQ ID NO: 7027 - protein, 15 aa, Artificial Sequence
  Cyclic GFR-binding peptide
SSLSILFFIGKTPKI

SEQ ID NO: 7028 - protein, 19 aa, Artificial Sequence
  Cyclic GFR-binding peptide
  MOD_RES (5)..(6): Xaa is C or S
IPEPXXVPEKMSSLSILFF

SEQ ID NO: 7029 - protein, 27 aa, Artificial Sequence
  Cyclic GFR-binding peptide
  MOD_RES (6)..(7): Xaa is C or S
STPPTXXVPTRLSSLSILFFDSANNVV

SEQ ID NO: 7030 - protein, 19 aa, Artificial Sequence
  Cyclic GFR-binding peptide
PQALSSLSILFFVGRKPKV

SEQ ID NO: 7031 - protein, 27 aa, Artificial Sequence
  Cyclic GFR-binding peptide
  MOD_RES (6)..(7): Xaa is C or S
ASASPXXVPQDLSSLSILFFVGRTPKV

SEQ ID NO: 7032 - protein, 14 aa, Artificial Sequence
  Cyclic GFR-binding peptide
  MOD_RES (1)..(1): Xaa is C or S
XVPEKMSSLSILFF

SEQ ID NO: 7033 - protein, 18 aa, Artificial Sequence
  Cyclic GFR-binding peptide
  MOD_RES (4)..(5): Xaa is C or S
PASXXVPARLSSLSILFF

SEQ ID NO: 7034 - protein, 18 aa, Artificial Sequence
  Cyclic GFR-binding peptide
  MOD_RES (4)..(5): Xaa is C or S
PEPXXVPEKMSSLSILFF

SEQ ID NO: 7035 - protein, 16 aa, Artificial Sequence
  Cyclic GFR-binding peptide
  MOD_RES (1)..(1): Xaa is C or S
XQPSRVHHSSLSVLFF

SEQ ID NO: 7036 - protein, 18 aa, Artificial Sequence
  Cyclic GFR-binding peptide
  MOD_RES (4)..(5): Xaa is C or S
AGPXXTPTKMSSLSMLFF

SEQ ID NO: 7037 - protein, 20 aa, Artificial Sequence
  Cyclic GFR-binding peptide
  MOD_RES (6)..(7): Xaa is C or S
STPPTXXVPTRLSSLSILFF

SEQ ID NO: 7038 - protein, 16 aa, Artificial Sequence
  Cyclic GFR-binding peptide
LSSLSILFFVGRKPKV

SEQ ID NO: 7039 - protein, 14 aa, Artificial Sequence
  Cyclic GFR-binding peptide
  MOD_RES (1)..(1): Xaa is C or S
XAPVKTSSLSMLFF

SEQ ID NO: 7040 - protein, 18 aa, Artificial Sequence
  Cyclic GFR-binding peptide
TKLSSLSILFFDKGVVTY

SEQ ID NO: 7041 - protein, 27 aa, Artificial Sequence
  Cyclic GFR-binding peptide
  MOD_RES (6)..(7): Xaa is C or S
HVPKPXXAPTKLSSLSVLFFDDSSNVI

SEQ ID NO: 7042 - protein, 17 aa, Artificial Sequence
  Cyclic GFR-binding peptide
QLSSLSVLFFDDSSNVI

SEQ ID NO: 7043 - protein, 17 aa, Artificial Sequence
  Cyclic GFR-binding peptide
KLSSLSILFFDKGVVTY

SEQ ID NO: 7044 - protein, 18 aa, Artificial Sequence
  Cyclic GFR-binding peptide
TKLSSLSVLFFDDSSNVI

SEQ ID NO: 7045 - protein, 14 aa, Artificial Sequence
  Cyclic GFR-binding peptide
  MOD_RES (1)..(1): Xaa is C or S
XAPTKLSSLSVLFF

SEQ ID NO: 7046 - protein, 19 aa, Artificial Sequence
  Cyclic GFR-binding peptide
  MOD_RES (5)..(6): Xaa is C or S
VPKPXXAPTKLSSLSVLFF

SEQ ID NO: 7047 - protein, 19 aa, Artificial Sequence
  Cyclic GFR-binding peptide
  MOD_RES (5)..(6): Xaa is C or S
TPPTXXVPTRLSSLSILFF

SEQ ID NO: 7048 - protein, 17 aa, Artificial Sequence
  Cyclic GFR-binding peptide
  MOD_RES (3)..(4): Xaa is C or S
SPXXVPQDLSSLSILFF

SEQ ID NO: 7049 - protein, 15 aa, Artificial Sequence
  Cyclic GFR-binding peptide
SSLSILFFDAANNVV

SEQ ID NO: 7050 - protein, 27 aa, Artificial Sequence
  Cyclic GFR-binding peptide
  MOD_RES (6)..(7): Xaa is C or S
TVPKPXXAPTQLSSLSVLFFDDSSNVI

SEQ ID NO: 7051 - protein, 27 aa, Artificial Sequence
  Cyclic GFR-binding peptide
  MOD_RES (6)..(7): Xaa is C or S
RVPSTXXAPVKTSSLSMLFFDNGRVLL

SEQ ID NO: 7052 - protein, 18 aa, Artificial Sequence
  Cyclic GFR-binding peptide
  MOD_RES (3)..(3): Xaa is C or S
VKXQPSRVHHSSLSVLFF

SEQ ID NO: 7053 - protein, 19 aa, Artificial Sequence
  Cyclic GFR-binding peptide
  MOD_RES (5)..(6): Xaa is C or S
VGKAXXVPTKLSSLSVLFF

SEQ ID NO: 7054 - protein, 15 aa, Artificial Sequence
  Cyclic GFR-binding peptide
SSLSILFFDSANNVV

SEQ ID NO: 7055 - protein, 20 aa, Artificial Sequence
  Cyclic GFR-binding peptide
  MOD_RES (6)..(7): Xaa is C or S
RVPSTXXAPVKTSSLSMLFF

SEQ ID NO: 7056 - protein, 18 aa, Artificial Sequence
  Cyclic GFR-binding peptide
TQLSSLSVLFFDDSSNVI

SEQ ID NO: 7057 - protein, 16 aa, Artificial Sequence
  Cyclic GFR-binding peptide
  MOD_RES (2)..(3): Xaa is C or S
PXXVPQALSSLSILFF

SEQ ID NO: 7058 - protein, 29 aa, Artificial Sequence
  Cyclic GFR-binding peptide
  MOD_RES (5)..(5): Xaa is C or S
SSVKXQPSRVHHSSLSVLFFEYVRKKPKL

SEQ ID NO: 7059 - protein, 17 aa, Artificial Sequence
  Cyclic GFR-binding peptide
KLSSLSVLFFDSSNNVI

SEQ ID NO: 7060 - protein, 16 aa, Artificial Sequence
  Cyclic GFR-binding peptide
  MOD_RES (2)..(3): Xaa is C or S
PXXAPTQLSSLSVLFF

SEQ ID NO: 7061 - protein, 19 aa, Artificial Sequence
  Cyclic GFR-binding peptide
PTKLSSLSVLFFDDMGVPT

SEQ ID NO: 7062 - protein, 15 aa, Artificial Sequence
  Cyclic GFR-binding peptide
  MOD_RES (1)..(2): Xaa is C or S
XXVPQDLSSLSILFF

SEQ ID NO: 7063 - protein, 27 aa, Artificial Sequence
  Cyclic GFR-binding peptide
  MOD_RES (6)..(7): Xaa is C or S
YVPKPXXAPTKLSSLSVLFFDDSSNVI

SEQ ID NO: 7064 - protein, 17 aa, Artificial Sequence
  Cyclic GFR-binding peptide
  MOD_RES (3)..(4): Xaa is C or S
KAXXVPTKLSSLSVLFF

SEQ ID NO: 7065 - protein, 20 aa, Artificial Sequence
  Cyclic GFR-binding peptide
  MOD_RES (6)..(7): Xaa is C or S
AVPKAXXAPTKLSSLSVLFF

SEQ ID NO: 7066 - protein, 18 aa, Artificial Sequence
  Cyclic GFR-binding peptide
TKLSSLSVLFFDSSNNVI

SEQ ID NO: 7067 - protein, 19 aa, Artificial Sequence
  Cyclic GFR-binding peptide
PTRLSSLSILFFDSANNVV

SEQ ID NO: 7068 - protein, 20 aa, Artificial Sequence
  Cyclic GFR-binding peptide
  MOD_RES (6)..(7): Xaa is C or S
HVPKPXXAPTKLSSLSVLFF

SEQ ID NO: 7069 - protein, 13 aa, Artificial Sequence
  Cyclic GFR-binding peptide
VPARLSSLSILFF

SEQ ID NO: 7070 - protein, 19 aa, Artificial Sequence
  Cyclic GFR-binding peptide
PTQLSSLSVLFFDDSSNVI

SEQ ID NO: 7071 - protein, 20 aa, Artificial Sequence
  Cyclic GFR-binding peptide
  MOD_RES (6)..(7): Xaa is C or S
GSAGPXXTPTKMSSLSMLFF

SEQ ID NO: 7072 - protein, 18 aa, Artificial Sequence
  Cyclic GFR-binding peptide
ARLSSLSILFFDAANNVV

SEQ ID NO: 7073 - protein, 16 aa, Artificial Sequence
  Cyclic GFR-binding peptide
  MOD_RES (2)..(3): Xaa is C or S
AXXVPTKLSSLSILFF

SEQ ID NO: 7074 - protein, 18 aa, Artificial Sequence
  Cyclic GFR-binding peptide
HSSLSVLFFEYVRKKPKL

SEQ ID NO: 7075 - protein, 17 aa, Artificial Sequence
  Cyclic GFR-binding peptide
  MOD_RES (3)..(4): Xaa is C or S
APXXVPQALSSLSILFF

SEQ ID NO: 7076 - protein, 16 aa, Artificial Sequence
  Cyclic GFR-binding peptide
TSSLSMLFFDNGRVLL

SEQ ID NO: 7077 - protein, 16 aa, Artificial Sequence
  Cyclic GFR-binding peptide
LSSLSVLFFDDSSNVI

SEQ ID NO: 7078 - protein, 15 aa, Artificial Sequence
  Cyclic GFR-binding peptide
  MOD_RES (1)..(2): Xaa is C or S
XXVPTKLSSLSVLFF

SEQ ID NO: 7079 - protein, 16 aa, Artificial Sequence
  Cyclic GFR-binding peptide
  MOD_RES (3)..(3): Xaa is C or S
PTXAPTKLSSLSVLFF

SEQ ID NO: 7080 - protein, 15 aa, Artificial Sequence
  Cyclic GFR-binding peptide
  MOD_RES (1)..(2): Xaa is C or S
XXVPEKMSSLSILFF

SEQ ID NO: 7081 - protein, 15 aa, Artificial Sequence
  Cyclic GFR-binding peptide
SSLSVLFFDSSNNVI

SEQ ID NO: 7082 - protein, 14 aa, Artificial Sequence
  Cyclic GFR-binding peptide
  MOD_RES (1)..(1): Xaa is C or S
XVSQDLSSLSILFF

SEQ ID NO: 7083 - protein, 13 aa, Artificial Sequence
  Cyclic GFR-binding peptide
VSQDLSSLSILFF

SEQ ID NO: 7084 - protein, 16 aa, Artificial Sequence
  Cyclic GFR-binding peptide
LSSLSILFFVGRTPKV

SEQ ID NO: 7085 - protein, 19 aa, Artificial Sequence
  Cyclic GFR-binding peptide
  MOD_RES (5)..(6): Xaa is C or S
APASXXVPARLSSLSILFF

SEQ ID NO: 7086 - protein, 21 aa, Artificial Sequence
  Cyclic GFR-binding peptide
PTEESSLSMLFFRIKPHQGQH

SEQ ID NO: 7087 - protein, 17 aa, Artificial Sequence
  Cyclic GFR-binding peptide
SSLSMLFFRIKPHQGQH

SEQ ID NO: 7088 - protein, 16 aa, Artificial Sequence
  Cyclic GFR-binding peptide
  MOD_RES (2)..(3): Xaa is C or S
AXXAPTKLSSLSVLFF

SEQ ID NO: 7089 - protein, 16 aa, Artificial Sequence
  Cyclic GFR-binding peptide
  MOD_RES (2)..(3): Xaa is C or S
PXXVPQDLSSLSILFF

SEQ ID NO: 7090 - protein, 18 aa, Artificial Sequence
  Cyclic GFR-binding peptide
  MOD_RES (4)..(5): Xaa is C or S
ASPXXVPQDLSSLSILFF

SEQ ID NO: 7091 - protein, 20 aa, Artificial Sequence
  Cyclic GFR-binding peptide
  MOD_RES (6)..(7): Xaa is C or S
KVGKAXXVPTKLSSLSVLFF

SEQ ID NO: 7092 - protein, 19 aa, Artificial Sequence
  Cyclic GFR-binding peptide
  MOD_RES (5)..(6): Xaa is C or S
VPSTXXAPVKTSSLSMLFF

SEQ ID NO: 7093 - protein, 15 aa, Artificial Sequence
  Cyclic GFR-binding peptide
  MOD_RES (1)..(2): Xaa is C or S
XXVPQALSSLSILFF

SEQ ID NO: 7094 - protein, 20 aa, Artificial Sequence
  Cyclic GFR-binding peptide
  MOD_RES (6)..(7): Xaa is C or S
ASASPXXVSQDLSSLSILFF

SEQ ID NO: 7095 - protein, 18 aa, Artificial Sequence
  Cyclic GFR-binding peptide
  MOD_RES (4)..(5): Xaa is C or S
GKAXXVPTKLSSLSVLFF

SEQ ID NO: 7096 - protein, 17 aa, Artificial Sequence
  Cyclic GFR-binding peptide
ALSSLSILFFVGRKPKV

SEQ ID NO: 7097 - protein, 13 aa, Artificial Sequence
  Cyclic GFR-binding peptide
TPTKMSSLSMLFF

SEQ ID NO: 7098 - protein, 16 aa, Artificial Sequence
  Cyclic GFR-binding peptide
LSSLSILFFDAANNVV

SEQ ID NO: 7099 - protein, 17 aa, Artificial Sequence
  Cyclic GFR-binding peptide
  MOD_RES (3)..(4): Xaa is C or S
GPXXTPTKMSSLSMLFF

SEQ ID NO: 7100 - protein, 14 aa, Artificial Sequence
  Cyclic GFR-binding peptide
  MOD_RES (1)..(1): Xaa is C or S
XVPTEESSLSMLFF

SEQ ID NO: 7101 - protein, 15 aa, Artificial Sequence
  Cyclic GFR-binding peptide
SSLSILFFVGRTPKV

SEQ ID NO: 7102 - protein, 27 aa, Artificial Sequence
  Cyclic GFR-binding peptide
  MOD_RES (6)..(7): Xaa is C or S
ASAAPXXVPQALSSLSILFFVGRKPKV

SEQ ID NO: 7103 - protein, 17 aa, Artificial Sequence
  Cyclic GFR-binding peptide
KLSSLSVLFFDDMGVPT

SEQ ID NO: 7104 - protein, 14 aa, Artificial Sequence
  Cyclic GFR-binding peptide
  MOD_RES (1)..(1): Xaa is C or S
XVPTRLSSLSILFF

SEQ ID NO: 7105 - protein, 13 aa, Artificial Sequence
  Cyclic GFR-binding peptide
VPTKLSSLSVLFF

SEQ ID NO: 7106 - protein, 16 aa, Artificial Sequence
  Cyclic GFR-binding peptide
  MOD_RES (2)..(3): Xaa is C or S
PXXAPTKLSSLSVLFF

SEQ ID NO: 7107 - protein, 18 aa, Artificial Sequence
  Cyclic GFR-binding peptide
ESSLSMLFFRIKPHQGQH

SEQ ID NO: 7108 - protein, 13 aa, Artificial Sequence
  Cyclic GFR-binding peptide
VPEKMSSLSILFF

SEQ ID NO: 7109 - protein, 18 aa, Artificial Sequence
  Cyclic GFR-binding peptide
QDLSSLSILFFIGKTPKI

SEQ ID NO: 7110 - protein, 16 aa, Artificial Sequence
  Cyclic GFR-binding peptide
LSSLSVLFFDDMGVPT

SEQ ID NO: 7111 - protein, 27 aa, Artificial Sequence
  Cyclic GFR-binding peptide
  MOD_RES (7)..(7): Xaa is C or S
HVTKPTXAPTKLSSLSVLFFDDSSNVI

SEQ ID NO: 7112 - protein, 20 aa, Artificial Sequence
  Cyclic GFR-binding peptide
TEESSLSMLFFRIKPHQGQH

SEQ ID NO: 7113 - protein, 27 aa, Artificial Sequence
  Cyclic GFR-binding peptide
  MOD_RES (6)..(7): Xaa is C or S
GIPEPXXVPEKMSSLSILFFDENKNVV

SEQ ID NO: 7114 - protein, 18 aa, Artificial Sequence
  Cyclic GFR-binding peptide
TKLSSLSVLFFDDMGVPT

SEQ ID NO: 7115 - protein, 15 aa, Artificial Sequence
  Cyclic GFR-binding peptide
  MOD_RES (1)..(2): Xaa is C or S
XXTPTKMSSLSMLFF

SEQ ID NO: 7116 - protein, 27 aa, Artificial Sequence
  Cyclic GFR-binding peptide
  MOD_RES (6)..(7): Xaa is C or S
ASASPXXVSQDLSSLSILFFIGKTPKI

SEQ ID NO: 7117 - protein, 14 aa, Artificial Sequence
  Cyclic GFR-binding peptide
  MOD_RES (1)..(1): Xaa is C or S
XAPTQLSSLSVLFF

SEQ ID NO: 7118 - protein, 16 aa, Artificial Sequence
  Cyclic GFR-binding peptide
MSSLSILFFDENKNVV

SEQ ID NO: 7119 - protein, 15 aa, Artificial Sequence
  Cyclic GFR-binding peptide
SSLSMLFFNDKQQII

SEQ ID NO: 7120 - protein, 15 aa, Artificial Sequence
  Cyclic GFR-binding peptide
SSLSILFFDKGVVTY

SEQ ID NO: 7121 - protein, 14 aa, Artificial Sequence
  Cyclic GFR-binding peptide
  MOD_RES (1)..(1): Xaa is C or S
XVPTKLSSLSILFF

SEQ ID NO: 7122 - protein, 20 aa, Artificial Sequence
  Cyclic GFR-binding peptide
  MOD_RES (6)..(7): Xaa is C or S
TVPKPXXAPTQLSSLSVLFF

SEQ ID NO: 7123 - protein, 18 aa, Artificial Sequence
  Cyclic GFR-binding peptide
  MOD_RES (4)..(5): Xaa is C or S
AAPXXVPQALSSLSILFF

SEQ ID NO: 7124 - protein, 19 aa, Artificial Sequence
  Cyclic GFR-binding peptide
  MOD_RES (5)..(6): Xaa is C or S
VPKPXXAPTQLSSLSVLFF

SEQ ID NO: 7125 - protein, 16 aa, Artificial Sequence
  Cyclic GFR-binding peptide
LSSLSILFFDSANNVV

SEQ ID NO: 7126 - protein, 19 aa, Artificial Sequence
  Cyclic GFR-binding peptide
PTKLSSLSVLFFDDSSNVI

SEQ ID NO: 7127 - protein, 27 aa, Artificial Sequence
  Cyclic GFR-binding peptide
  MOD_RES (6)..(7): Xaa is C or S
GSAGPXXTPTKMSSLSMLFFNDKQQII

SEQ ID NO: 7128 - protein, 14 aa, Artificial Sequence
  Cyclic GFR-binding peptide
  MOD_RES (1)..(1): Xaa is C or S
XVPQALSSLSILFF

SEQ ID NO: 7129 - protein, 20 aa, Artificial Sequence
  Cyclic GFR-binding peptide
  MOD_RES (7)..(7): Xaa is C or S
HVTKPTXAPTKLSSLSVLFF

SEQ ID NO: 7130 - protein, 15 aa, Artificial Sequence
  Cyclic GFR-binding peptide
QPSRVHHSSLSVLFF

SEQ ID NO: 7131 - protein, 19 aa, Artificial Sequence
  Cyclic GFR-binding peptide
  MOD_RES (4)..(4): Xaa is C or S
SVKXQPSRVHHSSLSVLFF

SEQ ID NO: 7132 - protein, 19 aa, Artificial Sequence
  Cyclic GFR-binding peptide
SQDLSSLSILFFIGKTPKI

SEQ ID NO: 7133 - protein, 17 aa, Artificial Sequence
  Cyclic GFR-binding peptide
  MOD_RES (4)..(4): Xaa is C or S
GLEXVPTEESSLSMLFF

SEQ ID NO: 7134 - protein, 17 aa, Artificial Sequence
  Cyclic GFR-binding peptide
KMSSLSILFFDENKNVV

SEQ ID NO: 7135 - protein, 20 aa, Artificial Sequence
  Cyclic GFR-binding peptide
  MOD_RES (6)..(7): Xaa is C or S
GIPEPXXVPEKMSSLSILFF

SEQ ID NO: 7136 - protein, 13 aa, Artificial Sequence
  Cyclic GFR-binding peptide
APTKLSSLSVLFF

SEQ ID NO: 7137 - protein, 20 aa, Artificial Sequence
  Cyclic GFR-binding peptide
  MOD_RES (6)..(7): Xaa is C or S
AAPASXXVPARLSSLSILFF

SEQ ID NO: 7138 - protein, 27 aa, Artificial Sequence
  Cyclic GFR-binding peptide
  MOD_RES (6)..(7): Xaa is C or S
AVPKAXXAPTKLSSLSVLFFDSSNNVI

SEQ ID NO: 7139 - protein, 29 aa, Artificial Sequence
  Cyclic GFR-binding peptide
  MOD_RES (7)..(7): Xaa is C or S
NDEGLEXVPTEESSLSMLFFRIKPHQGQH

SEQ ID NO: 7140 - protein, 19 aa, Artificial Sequence
  Cyclic GFR-binding peptide
  MOD_RES (5)..(6): Xaa is C or S
VPKAXXAPTKLSSLSVLFF

SEQ ID NO: 7141 - protein, 17 aa, Artificial Sequence
  Cyclic GFR-binding peptide
RLSSLSILFFDSANNVV

SEQ ID NO: 7142 - protein, 15 aa, Artificial Sequence
  Cyclic GFR-binding peptide
SSLSVLFFDDMGVPT

SEQ ID NO: 7143 - protein, 16 aa, Artificial Sequence
  Cyclic GFR-binding peptide
  MOD_RES (2)..(3): Xaa is C or S
SXXVPARLSSLSILFF

SEQ ID NO: 7144 - protein, 14 aa, Artificial Sequence
  Cyclic GFR-binding peptide
PSRVHHSSLSVLFF

SEQ ID NO: 7145 - protein, 17 aa, Artificial Sequence
  Cyclic GFR-binding peptide
  MOD_RES (3)..(4): Xaa is C or S
KAXXVPTKLSSLSILFF

SEQ ID NO: 7146 - protein, 27 aa, Artificial Sequence
  Cyclic GFR-binding peptide
  MOD_RES (6)..(7): Xaa is C or S
KASKAXXVPTKLSSLSILFFDKGVVTY

SEQ ID NO: 7147 - protein, 14 aa, Artificial Sequence
  Cyclic GFR-binding peptide
  MOD_RES (1)..(1): Xaa is C or S
XTPTKMSSLSMLFF

SEQ ID NO: 7148 - protein, 19 aa, Artificial Sequence
  Cyclic GFR-binding peptide
PEKMSSLSILFFDENKNVV

SEQ ID NO: 7149 - protein, 20 aa, Artificial Sequence
  Cyclic GFR-binding peptide
  MOD_RES (6)..(7): Xaa is C or S
YVPKPXXAPTKLSSLSVLFF

SEQ ID NO: 7150 - protein, 19 aa, Artificial Sequence
  Cyclic GFR-binding peptide
  MOD_RES (5)..(6): Xaa is C or S
SASPXXVPQDLSSLSILFF

SEQ ID NO: 7151 - protein, 18 aa, Artificial Sequence
  Cyclic GFR-binding peptide
QALSSLSILFFVGRKPKV

SEQ ID NO: 7152 - protein, 16 aa, Artificial Sequence
  Cyclic GFR-binding peptide
LSSLSILFFIGKTPKI

SEQ ID NO: 7153 - protein, 18 aa, Artificial Sequence
  Cyclic GFR-binding peptide
  MOD_RES (5)..(5): Xaa is C or S
EGLEXVPTEESSLSMLFF

SEQ ID NO: 7154 - protein, 17 aa, Artificial Sequence
  Cyclic GFR-binding peptide
  MOD_RES (3)..(4): Xaa is C or S
PTXXVPTRLSSLSILFF

SEQ ID NO: 7155 - protein, 16 aa, Artificial Sequence
  Cyclic GFR-binding peptide
  MOD_RES (3)..(3): Xaa is C or S
LEXVPTEESSLSMLFF

SEQ ID NO: 7156 - protein, 15 aa, Artificial Sequence
  Cyclic GFR-binding peptide
  MOD_RES (1)..(2): Xaa is C or S
XXVSQDLSSLSILFF

SEQ ID NO: 7157 - protein, 20 aa, Artificial Sequence
  Cyclic GFR-binding peptide
  MOD_RES (6)..(7): Xaa is C or S
KASKAXXVPTKLSSLSILFF

SEQ ID NO: 7158 - protein, 17 aa, Artificial Sequence
  Cyclic GFR-binding peptide
  MOD_RES (4)..(4): Xaa is C or S
KPTXAPTKLSSLSVLFF

SEQ ID NO: 7159 - protein, 17 aa, Artificial Sequence
  Cyclic GFR-binding peptide
  MOD_RES (3)..(4): Xaa is C or S
ASXXVPARLSSLSILFF

SEQ ID NO: 7160 - protein, 18 aa, Artificial Sequence
  Cyclic GFR-binding peptide
VKTSSLSMLFFDNGRVLL

SEQ ID NO: 7161 - protein, 19 aa, Artificial Sequence
  Cyclic GFR-binding peptide
  MOD_RES (6)..(6): Xaa is C or S
DEGLEXVPTEESSLSMLFF

SEQ ID NO: 7162 - protein, 13 aa, Artificial Sequence
  Cyclic GFR-binding peptide
VPTEESSLSMLFF

SEQ ID NO: 7163 - protein, 17 aa, Artificial Sequence
  Cyclic GFR-binding peptide
  MOD_RES (3)..(4): Xaa is C or S
KPXXAPTKLSSLSVLFF

SEQ ID NO: 7164 - protein, 18 aa, Artificial Sequence
  Cyclic GFR-binding peptide
  MOD_RES (4)..(5): Xaa is C or S
PKAXXAPTKLSSLSVLFF

SEQ ID NO: 7165 - protein, 19 aa, Artificial Sequence
  Cyclic GFR-binding peptide
  MOD_RES (5)..(6): Xaa is C or S
SAAPXXVPQALSSLSILFF

SEQ ID NO: 7166 - protein, 20 aa, Artificial Sequence
  Cyclic GFR-binding peptide
  MOD_RES (6)..(7): Xaa is C or S
ASASPXXVPQDLSSLSILFF

SEQ ID NO: 7167 - protein, 19 aa, Artificial Sequence
  Cyclic GFR-binding peptide
  MOD_RES (5)..(6): Xaa is C or S
ASKAXXVPTKLSSLSILFF

SEQ ID NO: 7168 - protein, 15 aa, Artificial Sequence
  Cyclic GFR-binding peptide
  MOD_RES (2)..(2): Xaa is C or S
EXVPTEESSLSMLFF

SEQ ID NO: 7169 - protein, 16 aa, Artificial Sequence
  Cyclic GFR-binding peptide
LSSLSILFFDKGVVTY

SEQ ID NO: 7170 - protein, 14 aa, Artificial Sequence
  Cyclic GFR-binding peptide
  MOD_RES (1)..(1): Xaa is C or S
XVPARLSSLSILFF

SEQ ID NO: 7171 - protein, 15 aa, Artificial Sequence
  Cyclic GFR-binding peptide
  MOD_RES (2)..(2): Xaa is C or S
TXAPTKLSSLSVLFF

SEQ ID NO: 7172 - protein, 13 aa, Artificial Sequence
  Cyclic GFR-binding peptide
VPQDLSSLSILFF

SEQ ID NO: 7173 - protein, 19 aa, Artificial Sequence
  Cyclic GFR-binding peptide
  MOD_RES (5)..(6): Xaa is C or S
SAGPXXTPTKMSSLSMLFF

SEQ ID NO: 7174 - protein, 19 aa, Artificial Sequence
  Cyclic GFR-binding peptide
PQDLSSLSILFFVGRTPKV

SEQ ID NO: 7175 - protein, 15 aa, Artificial Sequence
  Cyclic GFR-binding peptide
  MOD_RES (1)..(2): Xaa is C or S
XXVPTRLSSLSILFF

SEQ ID NO: 7176 - protein, 13 aa, Artificial Sequence
  Cyclic GFR-binding peptide
SRVHHSSLSVLFF

SEQ ID NO: 7177 - protein, 14 aa, Artificial Sequence
  Cyclic GFR-binding peptide
  MOD_RES (1)..(1): Xaa is C or S
XVPQDLSSLSILFF

SEQ ID NO: 7178 - protein, 18 aa, Artificial Sequence
  Cyclic GFR-binding peptide
  MOD_RES (4)..(5): Xaa is C or S
PKPXXAPTKLSSLSVLFF

SEQ ID NO: 7179 - protein, 18 aa, Artificial Sequence
  Cyclic GFR-binding peptide
QDLSSLSILFFVGRTPKV

SEQ ID NO: 7180 - protein, 16 aa, Artificial Sequence
  Cyclic GFR-binding peptide
  MOD_RES (2)..(3): Xaa is C or S
PXXVPEKMSSLSILFF

SEQ ID NO: 7181 - protein, 20 aa, Artificial Sequence
  Cyclic GFR-binding peptide
VHHSSLSVLFFEYVRKKPKL

SEQ ID NO: 7182 - protein, 16 aa, Artificial Sequence
  Cyclic GFR-binding peptide
LSSLSVLFFDSSNNVI

SEQ ID NO: 7183 - protein, 15 aa, Artificial Sequence
  Cyclic GFR-binding peptide
SSLSILFFVGRKPKV

SEQ ID NO: 7184 - protein, 19 aa, Artificial Sequence
  Cyclic GFR-binding peptide
PVKTSSLSMLFFDNGRVLL

SEQ ID NO: 7185 - protein, 15 aa, Artificial Sequence
  Cyclic GFR-binding peptide
  MOD_RES (1)..(2): Xaa is C or S
XXVPTKLSSLSILFF

SEQ ID NO: 7186 - protein, 15 aa, Artificial Sequence
  Cyclic GFR-binding peptide
  MOD_RES (1)..(2): Xaa is C or S
XXAPTKLSSLSVLFF

SEQ ID NO: 7187 - protein, 17 aa, Artificial Sequence
  Cyclic GFR-binding peptide
RLSSLSILFFDAANNVV

SEQ ID NO: 7188 - protein, 17 aa, Artificial Sequence
  Cyclic GFR-binding peptide
  MOD_RES (3)..(4): Xaa is C or S
SPXXVSQDLSSLSILFF

SEQ ID NO: 7189 - protein, 19 aa, Artificial Sequence
  Cyclic GFR-binding peptide
PARLSSLSILFFDAANNVV

SEQ ID NO: 7190 - protein, 17 aa, Artificial Sequence
  Cyclic GFR-binding peptide
  MOD_RES (3)..(4): Xaa is C or S
STXXAPVKTSSLSMLFF

SEQ ID NO: 7191 - protein, 18 aa, Artificial Sequence
  Cyclic GFR-binding peptide
  MOD_RES (4)..(5): Xaa is C or S
PKPXXAPTQLSSLSVLFF

SEQ ID NO: 7192 - protein, 15 aa, Artificial Sequence
  Cyclic GFR-binding peptide
  MOD_RES (1)..(2): Xaa is C or S
XXAPTQLSSLSVLFF

SEQ ID NO: 7193 - protein, 18 aa, Artificial Sequence
  Cyclic GFR-binding peptide
TRLSSLSILFFDSANNVV

SEQ ID NO: 7194 - protein, 19 aa, Artificial Sequence
  Cyclic GFR-binding peptide
  MOD_RES (6)..(6): Xaa is C or S
VTKPTXAPTKLSSLSVLFF

SEQ ID NO: 7195 - protein, 20 aa, Artificial Sequence
  Cyclic GFR-binding peptide
  MOD_RES (6)..(7): Xaa is C or S
ASAAPXXVPQALSSLSILFF

SEQ ID NO: 7196 - protein, 15 aa, Artificial Sequence
  Cyclic GFR-binding peptide
SSLSILFFDENKNVV

SEQ ID NO: 7197 - protein, 19 aa, Artificial Sequence
  Cyclic GFR-binding peptide
PTKLSSLSILFFDKGVVTY

SEQ ID NO: 7198 - protein, 21 aa, Artificial Sequence
  Cyclic GFR-binding peptide
RVHHSSLSVLFFEYVRKKPKL

SEQ ID NO: 7199 - protein, 16 aa, Artificial Sequence
  Cyclic GFR-binding peptide
  MOD_RES (2)..(3): Xaa is C or S
TXXVPTRLSSLSILFF

SEQ ID NO: 7200 - protein, 13 aa, Artificial Sequence
  Cyclic GFR-binding peptide
APVKTSSLSMLFF

SEQ ID NO: 7201 - protein, 14 aa, Artificial Sequence
  Cyclic GFR-binding peptide
  MOD_RES (1)..(1): Xaa is C or S
XVPTKLSSLSVLFF

SEQ ID NO: 7202 - protein, 16 aa, Artificial Sequence
  Cyclic GFR-binding peptide
  MOD_RES (2)..(3): Xaa is C or S
AXXVPTKLSSLSVLFF

SEQ ID NO: 7203 - protein, 15 aa, Artificial Sequence
  Cyclic GFR-binding peptide
SSLSVLFFDDSSNVI

SEQ ID NO: 7204 - protein, 17 aa, Artificial Sequence
  Cyclic GFR-binding peptide
DLSSLSILFFVGRTPKV

SEQ ID NO: 7205 - protein, 20 aa, Artificial Sequence
  Cyclic GFR-binding peptide
  MOD_RES (5)..(5): Xaa is C or S
SSVKXQPSRVHHSSLSVLFF

SEQ ID NO: 7206 - protein, 15 aa, Artificial Sequence
  Cyclic GFR-binding peptide
SSLSMLFFDNGRVLL

SEQ ID NO: 7207 - protein, 18 aa, Artificial Sequence
  Cyclic GFR-binding peptide
  MOD_RES (4)..(5): Xaa is C or S
PSTXXAPVKTSSLSMLFF

SEQ ID NO: 7208 - protein, 16 aa, Artificial Sequence
  Cyclic GFR-binding peptide
  MOD_RES (2)..(3): Xaa is C or S
PXXVSQDLSSLSILFF

SEQ ID NO: 7209 - protein, 18 aa, Artificial Sequence
  Cyclic GFR-binding peptide
TKMSSLSMLFFNDKQQII

SEQ ID NO: 7210 - protein, 17 aa, Artificial Sequence
  Cyclic GFR-binding peptide
  MOD_RES (3)..(4): Xaa is C or S
EPXXVPEKMSSLSILFF

SEQ ID NO: 7211 - protein, 15 aa, Artificial Sequence
  Cyclic GFR-binding peptide
  MOD_RES (1)..(2): Xaa is C or S
XXAPVKTSSLSMLFF

SEQ ID NO: 7212 - protein, 19 aa, Artificial Sequence
  Cyclic GFR-binding peptide
PTKLSSLSVLFFDSSNNVI

SEQ ID NO: 7213 - protein, 18 aa, Artificial Sequence
  Cyclic GFR-binding peptide
  MOD_RES (4)..(5): Xaa is C or S
SKAXXVPTKLSSLSILFF

SEQ ID NO: 7214 - protein, 18 aa, Artificial Sequence
  Cyclic GFR-binding peptide
  MOD_RES (5)..(5): Xaa is C or S
TKPTXAPTKLSSLSVLFF

SEQ ID NO: 7215 - protein, 16 aa, Artificial Sequence
  Cyclic GFR-binding peptide
  MOD_RES (2)..(3): Xaa is C or S
TXXAPVKTSSLSMLFF

SEQ ID NO: 7216 - protein, 17 aa, Artificial Sequence
  Cyclic GFR-binding peptide
KMSSLSMLFFNDKQQII

SEQ ID NO: 7217 - protein, 18 aa, Artificial Sequence
  Cyclic GFR-binding peptide
  MOD_RES (4)..(5): Xaa is C or S
PPTXXVPTRLSSLSILFF

SEQ ID NO: 7218 - protein, 18 aa, Artificial Sequence
  Cyclic GFR-binding peptide
  MOD_RES (4)..(5): Xaa is C or S
ASPXXVSQDLSSLSILFF

SEQ ID NO: 7219 - protein, 17 aa, Artificial Sequence
  Cyclic GFR-binding peptide
  MOD_RES (3)..(4): Xaa is C or S
KPXXAPTQLSSLSVLFF

SEQ ID NO: 7220 - protein, 16 aa, Artificial Sequence
  Cyclic GFR-binding peptide
  MOD_RES (14)..(15): Xaa is C or S
YYLITLPELDQPVXXP

SEQ ID NO: 7221 - protein, 17 aa, Artificial Sequence
  Cyclic GFR-binding peptide
IVNSSDDMIQVTINSLQ

SEQ ID NO: 7222 - protein, 15 aa, Artificial Sequence
  Cyclic GFR-binding peptide
  MOD_RES (14)..(15): Xaa is C or S
VKAIKVSRLDQSVXX

SEQ ID NO: 7223 - protein, 17 aa, Artificial Sequence
  Cyclic GFR-binding peptide
HQGQHPKIRYYVMPLPE

SEQ ID NO: 7224 - protein, 27 aa, Artificial Sequence
  Cyclic GFR-binding peptide
  MOD_RES (21)..(22): Xaa is C or S
VVKDYEDYYVMPLPELETPVXXAKPIS

SEQ ID NO: 7225 - protein, 15 aa, Artificial Sequence
  Cyclic GFR-binding peptide
IKPTKGIVKAIKVSR

SEQ ID NO: 7226 - protein, 13 aa, Artificial Sequence
  Cyclic GFR-binding peptide
YYVIPLPELDQPV

SEQ ID NO: 7227 - protein, 15 aa, Artificial Sequence
  Cyclic GFR-binding peptide
  MOD_RES (14)..(14): Xaa is C or S
VKAVKVSRLKTPAXT

SEQ ID NO: 7228 - protein, 20 aa, Artificial Sequence
  Cyclic GFR-binding peptide
  MOD_RES (14)..(15): Xaa is C or S
VKAVKVSRLKTPAXXPKPVY

SEQ ID NO: 7229 - protein, 19 aa, Artificial Sequence
  Cyclic GFR-binding peptide
  MOD_RES (14)..(15): Xaa is C or S
YYLVTLPELKTPAXXPKPV

SEQ ID NO: 7230 - protein, 17 aa, Artificial Sequence
  Cyclic GFR-binding peptide
FIPKKRVIEIKRVQVPR

SEQ ID NO: 7231 - protein, 15 aa, Artificial Sequence
  Cyclic GFR-binding peptide
VKPTRGVYYLITLPE

SEQ ID NO: 7232 - protein, 20 aa, Artificial Sequence
  Cyclic GFR-binding peptide
  MOD_RES (14)..(15): Xaa is C or S
YYLITLPELDQSVXXPSASA

SEQ ID NO: 7233 - protein, 15 aa, Artificial Sequence
  Cyclic GFR-binding peptide
  MOD_RES (14)..(15): Xaa is C or S
YYLITLPELDQPVXX

SEQ ID NO: 7234 - protein, 17 aa, Artificial Sequence
  Cyclic GFR-binding peptide
  MOD_RES (14)..(15): Xaa is C or S
YYLVTLPELQTPAXXPK

SEQ ID NO: 7235 - protein, 19 aa, Artificial Sequence
  Cyclic GFR-binding peptide
  MOD_RES (14)..(14): Xaa is C or S
IKRVQVPRLKTPAXTPKTV

SEQ ID NO: 7236 - protein, 18 aa, Artificial Sequence
  Cyclic GFR-binding peptide
  MOD_RES (14)..(14): Xaa is C or S
YYLVTLPELKTPAXTPKT

SEQ ID NO: 7237 - protein, 16 aa, Artificial Sequence
  Cyclic GFR-binding peptide
  MOD_RES (14)..(15): Xaa is C or S
YYVVPLPELKTPAXXP

SEQ ID NO: 7238 - protein, 16 aa, Artificial Sequence
  Cyclic GFR-binding peptide
  MOD_RES (14)..(14): Xaa is C or S
YYLVTLPELKTPAXTP

SEQ ID NO: 7239 - protein, 20 aa, Artificial Sequence
  Cyclic GFR-binding peptide
  MOD_RES (14)..(15): Xaa is C or S
MIQITINSLAQPVXXPAASA

SEQ ID NO: 7240 - protein, 19 aa, Artificial Sequence
  Cyclic GFR-binding peptide
HQGQHPKIRIKRMQVPREE

SEQ ID NO: 7241 - protein, 19 aa, Artificial Sequence
  Cyclic GFR-binding peptide
  MOD_RES (14)..(15): Xaa is C or S
VKAVKVSRLQTPAXXPKPV

SEQ ID NO: 7242 - protein, 13 aa, Artificial Sequence
  Cyclic GFR-binding peptide
MIQVTINSLQVQT

SEQ ID NO: 7243 - protein, 19 aa, Artificial Sequence
  Cyclic GFR-binding peptide
  MOD_RES (14)..(14): Xaa is C or S
VKAMKVSREETPVXELGED

SEQ ID NO: 7244 - protein, 16 aa, Artificial Sequence
  Cyclic GFR-binding peptide
  MOD_RES (14)..(15): Xaa is C or S
VKAIKVSRLDQSVXXP

SEQ ID NO: 7245 - protein, 17 aa, Artificial Sequence
  Cyclic GFR-binding peptide
LKPKKRVYEIKRVQVPR

SEQ ID NO: 7246 - protein, 18 aa, Artificial Sequence
  Cyclic GFR-binding peptide
IKPTKGIIKRIQVPRLDQ

SEQ ID NO: 7247 - protein, 16 aa, Artificial Sequence
  Cyclic GFR-binding peptide
VVKENEDVKAMKVSRL

SEQ ID NO: 7248 - protein, 17 aa, Artificial Sequence
  Cyclic GFR-binding peptide
IVNSSDDMIQVTINSLK

SEQ ID NO: 7249 - protein, 13 aa, Artificial Sequence
  Cyclic GFR-binding peptide
VKAMKVSREETPV

SEQ ID NO: 7250 - protein, 13 aa, Artificial Sequence
  Cyclic GFR-binding peptide
YYLMTLPELETPV

SEQ ID NO: 7251 - protein, 19 aa, Artificial Sequence
  Cyclic GFR-binding peptide
  MOD_RES (14)..(15): Xaa is C or S
YYVVPLPELKTPAXXPKPV

SEQ ID NO: 7252 - protein, 17 aa, Artificial Sequence
  Cyclic GFR-binding peptide
HQGQHPKIRMIQMTINS

SEQ ID NO: 7253 - protein, 15 aa, Artificial Sequence
  Cyclic GFR-binding peptide
  MOD_RES (14)..(15): Xaa is C or S
YYLMTLPELETPVXX

SEQ ID NO: 7254 - protein, 14 aa, Artificial Sequence
  Cyclic GFR-binding peptide
  MOD_RES (14)..(14): Xaa is C or S
YYLITLPELDQSVX

SEQ ID NO: 7255 - protein, 21 aa, Artificial Sequence
  Cyclic GFR-binding peptide
LKPKKRVYEIKRVQVPRHHVR

SEQ ID NO: 7256 - protein, 14 aa, Artificial Sequence
  Cyclic GFR-binding peptide
MIQVTINSHHVRSP

SEQ ID NO: 7257 - protein, 20 aa, Artificial Sequence
  Cyclic GFR-binding peptide
  MOD_RES (14)..(14): Xaa is C or S
VKAVKVSRLKTPAXTPKTVH

SEQ ID NO: 7258 - protein, 16 aa, Artificial Sequence
  Cyclic GFR-binding peptide
  MOD_RES (14)..(15): Xaa is C or S
YYVIPLPELDQPVXXP

SEQ ID NO: 7259 - protein, 18 aa, Artificial Sequence
  Cyclic GFR-binding peptide
VKPTRGVYYLITLPELDQ

SEQ ID NO: 7260 - protein, 13 aa, Artificial Sequence
  Cyclic GFR-binding peptide
VKAVKVSRLKTPA

SEQ ID NO: 7261 - protein, 16 aa, Artificial Sequence
  Cyclic GFR-binding peptide
VVKENEDIKRMQVPRL

SEQ ID NO: 7262 - protein, 20 aa, Artificial Sequence
  Cyclic GFR-binding peptide
  MOD_RES (14)..(15): Xaa is C or S
YYVIPLPELDQSVXXPSASA

SEQ ID NO: 7263 - protein, 17 aa, Artificial Sequence
  Cyclic GFR-binding peptide
  MOD_RES (14)..(15): Xaa is C or S
YYVVPLPELQTPAXXPK

SEQ ID NO: 7264 - protein, 17 aa, Artificial Sequence
  Cyclic GFR-binding peptide
HQGQHPKIRVKAMKVSR

SEQ ID NO: 7265 - protein, 17 aa, Artificial Sequence
  Cyclic GFR-binding peptide
VKPTRGVYYVIPLPELD

SEQ ID NO: 7266 - protein, 19 aa, Artificial Sequence
  Cyclic GFR-binding peptide
IKPTKGIYYLITLPELDQS

SEQ ID NO: 7267 - protein, 18 aa, Artificial Sequence
  Cyclic GFR-binding peptide
IKPTKGIVKAIKVSRLDQ

SEQ ID NO: 7268 - protein, 17 aa, Artificial Sequence
  Cyclic GFR-binding peptide
  MOD_RES (14)..(15): Xaa is C or S
IKRIQVPRLAQPVXXPA

SEQ ID NO: 7269 - protein, 14 aa, Artificial Sequence
  Cyclic GFR-binding peptide
  MOD_RES (14)..(14): Xaa is C or S
YYVVPLPELQTPAX

SEQ ID NO: 7270 - protein, 18 aa, Artificial Sequence
  Cyclic GFR-binding peptide
VVKENEDYYLMTLPELET

SEQ ID NO: 7271 - protein, 18 aa, Artificial Sequence
  Cyclic GFR-binding peptide
VVKDYEDMIQMTINSLET

SEQ ID NO: 7272 - protein, 17 aa, Artificial Sequence
  Cyclic GFR-binding peptide
  MOD_RES (14)..(14): Xaa is C or S
YYVVPLPELKTPAXTPK

SEQ ID NO: 7273 - protein, 15 aa, Artificial Sequence
  Cyclic GFR-binding peptide
YYLVTLPELQVQTPR

SEQ ID NO: 7274 - protein, 18 aa, Artificial Sequence
  Cyclic GFR-binding peptide
  MOD_RES (14)..(15): Xaa is C or S
MIQVTINSLQTPAXXPKP

SEQ ID NO: 7275 - protein, 14 aa, Artificial Sequence
  Cyclic GFR-binding peptide
  MOD_RES (14)..(14): Xaa is C or S
MIQMTINSLETPVX

SEQ ID NO: 7276 - protein, 16 aa, Artificial Sequence
  Cyclic GFR-binding peptide
IKPTKGIYYLITLPEL

SEQ ID NO: 7277 - protein, 15 aa, Artificial Sequence
  Cyclic GFR-binding peptide
  MOD_RES (14)..(14): Xaa is C or S
VKAMKVSREETPVXE

SEQ ID NO: 7278 - protein, 13 aa, Artificial Sequence
  Cyclic GFR-binding peptide
VKAIKVSRLDQSV

SEQ ID NO: 7279 - protein, 14 aa, Artificial Sequence
  Cyclic GFR-binding peptide
  MOD_RES (14)..(14): Xaa is C or S
IKRMQVPREETPVX

SEQ ID NO: 7280 - protein, 27 aa, Artificial Sequence
  Cyclic GFR-binding peptide
  MOD_RES (21)..(22): Xaa is C or S
VKPKRGVIKRIQVPRLAQPVXXPAASA

SEQ ID NO: 7281 - protein, 16 aa, Artificial Sequence
  Cyclic GFR-binding peptide
  MOD_RES (14)..(14): Xaa is C or S
YYVVPLPELKTPAXTP

SEQ ID NO: 7282 - protein, 17 aa, Artificial Sequence
  Cyclic GFR-binding peptide
  MOD_RES (14)..(15): Xaa is C or S
YYVIPLPELDQSVXXPS

SEQ ID NO: 7283 - protein, 16 aa, Artificial Sequence
  Cyclic GFR-binding peptide
  MOD_RES (14)..(15): Xaa is C or S
YYLVTLPELKTPAXXP

SEQ ID NO: 7284 - protein, 15 aa, Artificial Sequence
  Cyclic GFR-binding peptide
MIQVTINSHHVRSPQ

SEQ ID NO: 7285 - protein, 15 aa, Artificial Sequence
  Cyclic GFR-binding peptide
VKPKRGVIKRIQVPR

SEQ ID NO: 7286 - protein, 20 aa, Artificial Sequence
  Cyclic GFR-binding peptide
FIPKKRVIEYYLVTLPELQV

SEQ ID NO: 7287 - protein, 19 aa, Artificial Sequence
  Cyclic GFR-binding peptide
IVNSSDDYYVVPLPELKTP

SEQ ID NO: 7288 - protein, 14 aa, Artificial Sequence
  Cyclic GFR-binding peptide
  MOD_RES (14)..(14): Xaa is C or S
MIQITINSLDQPVX

SEQ ID NO: 7289 - protein, 15 aa, Artificial Sequence
  Cyclic GFR-binding peptide
VVKENEDYYVMPLPE

SEQ ID NO: 7290 - protein, 19 aa, Artificial Sequence
  Cyclic GFR-binding peptide
IVNSSDDYYVVPLPELQTP

SEQ ID NO: 7291 - protein, 20 aa, Artificial Sequence
  Cyclic GFR-binding peptide
  MOD_RES (14)..(15): Xaa is C or S
YYLMTLPELETPVXXAKPIK

SEQ ID NO: 7292 - protein, 14 aa, Artificial Sequence
  Cyclic GFR-binding peptide
  MOD_RES (14)..(14): Xaa is C or S
YYLMTLPEEETPVX

SEQ ID NO: 7293 - protein, 18 aa, Artificial Sequence
  Cyclic GFR-binding peptide
  MOD_RES (14)..(14): Xaa is C or S
IKRVQVPRLKTPAXTPKT

SEQ ID NO: 7294 - protein, 15 aa, Artificial Sequence
  Cyclic GFR-binding peptide
VVKDYEDYYLMTLPE

SEQ ID NO: 7295 - protein, 17 aa, Artificial Sequence
  Cyclic GFR-binding peptide
VVKENEDMIQMTINSLE

SEQ ID NO: 7296 - protein, 14 aa, Artificial Sequence
  Cyclic GFR-binding peptide
  MOD_RES (14)..(14): Xaa is C or S
IKRMQVPRLETPVX

SEQ ID NO: 7297 - protein, 15 aa, Artificial Sequence
  Cyclic GFR-binding peptide
  MOD_RES (14)..(15): Xaa is C or S
YYVVPLPELKTPAXX

SEQ ID NO: 7298 - protein, 16 aa, Artificial Sequence
  Cyclic GFR-binding peptide
VVKENEDMIQMTINSL

SEQ ID NO: 7299 - protein, 13 aa, Artificial Sequence
  Cyclic GFR-binding peptide
YYVVPLPELKTPA

SEQ ID NO: 7300 - protein, 17 aa, Artificial Sequence
  Cyclic GFR-binding peptide
  MOD_RES (14)..(15): Xaa is C or S
IKRVQVPRLQTPAXXPK

SEQ ID NO: 7301 - protein, 27 aa, Artificial Sequence
  Cyclic GFR-binding peptide
  MOD_RES (21)..(22): Xaa is C or S
VKPKRGVVKAIKVSRLAQPVXXPAASA

SEQ ID NO: 7302 - protein, 18 aa, Artificial Sequence
  Cyclic GFR-binding peptide
IKPTKGIMIQITINSLDQ

SEQ ID NO: 7303 - protein, 20 aa, Artificial Sequence
  Cyclic GFR-binding peptide
  MOD_RES (14)..(15): Xaa is C or S
YYVMPLPELETPVXXAKPIS

SEQ ID NO: 7304 - protein, 17 aa, Artificial Sequence
  Cyclic GFR-binding peptide
  MOD_RES (14)..(15): Xaa is C or S
IKRVQVPRLKTPAXXPK

SEQ ID NO: 7305 - protein, 29 aa, Artificial Sequence
  Cyclic GFR-binding peptide
  MOD_RES (25)..(25): Xaa is C or S
FIPKKRVIEMIQVTINSLQVQTPRXQVNR

SEQ ID NO: 7306 - protein, 17 aa, Artificial Sequence
  Cyclic GFR-binding peptide
  MOD_RES (16)..(16): Xaa is C or S
YYVVPLPEHHVRSPQXK

SEQ ID NO: 7307 - protein, 20 aa, Artificial Sequence
  Cyclic GFR-binding peptide
  MOD_RES (14)..(15): Xaa is C or S
IKRIQVPRLDQPVXXPSASA

SEQ ID NO: 7308 - protein, 14 aa, Artificial Sequence
  Cyclic GFR-binding peptide
MIQVTINSLQVQTP

SEQ ID NO: 7309 - protein, 17 aa, Artificial Sequence
  Cyclic GFR-binding peptide
  MOD_RES (14)..(15): Xaa is C or S
MIQITINSLAQPVXXPA

SEQ ID NO: 7310 - protein, 18 aa, Artificial Sequence
  Cyclic GFR-binding peptide
VVKDYEDVKAMKVSRLET

SEQ ID NO: 7311 - protein, 15 aa, Artificial Sequence
  Cyclic GFR-binding peptide
VKPKRGVVKAIKVSR

SEQ ID NO: 7312 - protein, 21 aa, Artificial Sequence
  Cyclic GFR-binding peptide
HQGQHPKIRVKAMKVSREETP

SEQ ID NO: 7313 - protein, 14 aa, Artificial Sequence
  Cyclic GFR-binding peptide
  MOD_RES (14)..(14): Xaa is C or S
YYLVTLPELKTPAX

SEQ ID NO: 7314 - protein, 16 aa, Artificial Sequence
  Cyclic GFR-binding peptide
  MOD_RES (14)..(15): Xaa is C or S
VKAIKVSRLAQPVXXP

SEQ ID NO: 7315 - protein, 18 aa, Artificial Sequence
  Cyclic GFR-binding peptide
  MOD_RES (14)..(15): Xaa is C or S
MIQMTINSLETPVXXAKP

SEQ ID NO: 7316 - protein, 17 aa, Artificial Sequence
  Cyclic GFR-binding peptide
  MOD_RES (14)..(14): Xaa is C or S
YYLVTLPELKTPAXTPK

SEQ ID NO: 7317 - protein, 17 aa, Artificial Sequence
  Cyclic GFR-binding peptide
  MOD_RES (14)..(15): Xaa is C or S
MIQMTINSLETPVXXAK

SEQ ID NO: 7318 - protein, 19 aa, Artificial Sequence
  Cyclic GFR-binding peptide
VKPKRGVYYLITLPELAQP

SEQ ID NO: 7319 - protein, 17 aa, Artificial Sequence
  Cyclic GFR-binding peptide
VVKENEDYYVMPLPELE

SEQ ID NO: 7320 - protein, 19 aa, Artificial Sequence
  Cyclic GFR-binding peptide
  MOD_RES (14)..(14): Xaa is C or S
YYLVTLPELKTPAXTPKTV

SEQ ID NO: 7321 - protein, 17 aa, Artificial Sequence
  Cyclic GFR-binding peptide
  MOD_RES (14)..(15): Xaa is C or S
VKAIKVSRLDQSVXXPS

SEQ ID NO: 7322 - protein, 27 aa, Artificial Sequence
  Cyclic GFR-binding peptide
  MOD_RES (21)..(22): Xaa is C or S
IKPTKGIVKAIKVSRLDQSVXXPSASA

SEQ ID NO: 7323 - protein, 19 aa, Artificial Sequence
  Cyclic GFR-binding peptide
VVKDYEDVKAMKVSRLETP

SEQ ID NO: 7324 - protein, 15 aa, Artificial Sequence
  Cyclic GFR-binding peptide
  MOD_RES (14)..(14): Xaa is C or S
YYVVPLPELKTPAXT

SEQ ID NO: 7325 - protein, 20 aa, Artificial Sequence
  Cyclic GFR-binding peptide
  MOD_RES (14)..(15): Xaa is C or S
IKRIQVPRLAQPVXXPAASA

SEQ ID NO: 7326 - protein, 13 aa, Artificial Sequence
  Cyclic GFR-binding peptide
IKRMQVPRLETPV

SEQ ID NO: 7327 - protein, 16 aa, Artificial Sequence
  Cyclic GFR-binding peptide
  MOD_RES (14)..(15): Xaa is C or S
YYLMTLPELETPVXXA

SEQ ID NO: 7328 - protein, 17 aa, Artificial Sequence
  Cyclic GFR-binding peptide
VKPKRGVYYVIPLPELA

SEQ ID NO: 7329 - protein, 18 aa, Artificial Sequence
  Cyclic GFR-binding peptide
VKPKRGVYYLITLPELAQ

SEQ ID NO: 7330 - protein, 15 aa, Artificial Sequence
  Cyclic GFR-binding peptide
  MOD_RES (14)..(15): Xaa is C or S
VKAVKVSRLKTPAXX

SEQ ID NO: 7331 - protein, 16 aa, Artificial Sequence
  Cyclic GFR-binding peptide
VKPTRGVYYVIPLPEL

SEQ ID NO: 7332 - protein, 14 aa, Artificial Sequence
  Cyclic GFR-binding peptide
  MOD_RES (14)..(14): Xaa is C or S
YYLVTLPELQTPAX

SEQ ID NO: 7333 - protein, 15 aa, Artificial Sequence
  Cyclic GFR-binding peptide
  MOD_RES (14)..(15): Xaa is C or S
YYVIPLPELDQPVXX

SEQ ID NO: 7334 - protein, 18 aa, Artificial Sequence
  Cyclic GFR-binding peptide
VVKDYEDIKRMQVPRLET

SEQ ID NO: 7335 - protein, 19 aa, Artificial Sequence
  Cyclic GFR-binding peptide
HQGQHPKIRYYLMTLPEEE

SEQ ID NO: 7336 - protein, 29 aa, Artificial Sequence
  Cyclic GFR-binding peptide
  MOD_RES (25)..(25): Xaa is C or S
FIPKKRVIEVKAVKVSRLQVQTPRXQVNR

SEQ ID NO: 7337 - protein, 19 aa, Artificial Sequence
  Cyclic GFR-binding peptide
  MOD_RES (14)..(15): Xaa is C or S
VKAIKVSRLDQSVXXPSAS

SEQ ID NO: 7338 - protein, 16 aa, Artificial Sequence
  Cyclic GFR-binding peptide
IVNSSDDMIQVTINSL

SEQ ID NO: 7339 - protein, 20 aa, Artificial Sequence
  Cyclic GFR-binding peptide
  MOD_RES (14)..(14): Xaa is C or S
YYVVPLPELKTPAXTPKTVH

SEQ ID NO: 7340 - protein, 19 aa, Artificial Sequence
  Cyclic GFR-binding peptide
FIPKKRVIEYYLVTLPELQ

SEQ ID NO: 7341 - protein, 14 aa, Artificial Sequence
  Cyclic GFR-binding peptide
  MOD_RES (14)..(14): Xaa is C or S
YYVMPLPEEETPVX

SEQ ID NO: 7342 - protein, 27 aa, Artificial Sequence
  Cyclic GFR-binding peptide
  MOD_RES (21)..(22): Xaa is C or S
VKPKRGVMIQITINSLAQPVXXPAASA

SEQ ID NO: 7343 - protein, 19 aa, Artificial Sequence
  Cyclic GFR-binding peptide
  MOD_RES (14)..(15): Xaa is C or S
VKAMKVSRLETPVXXAKPI

SEQ ID NO: 7344 - protein, 19 aa, Artificial Sequence
  Cyclic GFR-binding peptide
  MOD_RES (14)..(15): Xaa is C or S
YYLMTLPELETPVXXAKPI

SEQ ID NO: 7345 - protein, 27 aa, Artificial Sequence
  Cyclic GFR-binding peptide
  MOD_RES (21)..(22): Xaa is C or S
IKPTKGIIKRIQVPRLDQSVXXPSASA

SEQ ID NO: 7346 - protein, 19 aa, Artificial Sequence
  Cyclic GFR-binding peptide
VVKDYEDIKRMQVPRLETP

SEQ ID NO: 7347 - protein, 17 aa, Artificial Sequence
  Cyclic GFR-binding peptide
  MOD_RES (14)..(15): Xaa is C or S
YYLMTLPELETPVXXAK

SEQ ID NO: 7348 - protein, 29 aa, Artificial Sequence
  Cyclic GFR-binding peptide
  MOD_RES (25)..(25): Xaa is C or S
LKPKKRVYEYYLVTLPEHHVRSPQXKVSS

SEQ ID NO: 7349 - protein, 20 aa, Artificial Sequence
  Cyclic GFR-binding peptide
  MOD_RES (14)..(14): Xaa is C or S
YYLMTLPEEETPVXELGEDN

SEQ ID NO: 7350 - protein, 19 aa, Artificial Sequence
  Cyclic GFR-binding peptide
VVKENEDYYLMTLPELETP

SEQ ID NO: 7351 - protein, 17 aa, Artificial Sequence
  Cyclic GFR-binding peptide
IVNSSDDIKRVQVPRLK

SEQ ID NO: 7352 - protein, 14 aa, Artificial Sequence
  Cyclic GFR-binding peptide
  MOD_RES (14)..(14): Xaa is C or S
VKAIKVSRLAQPVX

SEQ ID NO: 7353 - protein, 16 aa, Artificial Sequence
  Cyclic GFR-binding peptide
IVNSSDDIKRVQVPRL

SEQ ID NO: 7354 - protein, 15 aa, Artificial Sequence
  Cyclic GFR-binding peptide
  MOD_RES (14)..(15): Xaa is C or S
IKRMQVPRLETPVXX

SEQ ID NO: 7355 - protein, 27 aa, Artificial Sequence
  Cyclic GFR-binding peptide
  MOD_RES (21)..(22): Xaa is C or S
IKPTKGIMIQITINSLDQSVXXPSASA

SEQ ID NO: 7356 - protein, 18 aa, Artificial Sequence
  Cyclic GFR-binding peptide
  MOD_RES (16)..(16): Xaa is C or S
IKRVQVPRHHVRSPQXKV

SEQ ID NO: 7357 - protein, 17 aa, Artificial Sequence
  Cyclic GFR-binding peptide
  MOD_RES (14)..(15): Xaa is C or S
YYLITLPELAQPVXXPA

SEQ ID NO: 7358 - protein, 17 aa, Artificial Sequence
  Cyclic GFR-binding peptide
  MOD_RES (16)..(16): Xaa is C or S
IKRVQVPRHHVRSPQXK

SEQ ID NO: 7359 - protein, 14 aa, Artificial Sequence
  Cyclic GFR-binding peptide
  MOD_RES (14)..(14): Xaa is C or S
IKRIQVPRLDQSVX

SEQ ID NO: 7360 - protein, 19 aa, Artificial Sequence
  Cyclic GFR-binding peptide
  MOD_RES (14)..(15): Xaa is C or S
YYVIPLPELDQPVXXPSAS

SEQ ID NO: 7361 - protein, 15 aa, Artificial Sequence
  Cyclic GFR-binding peptide
  MOD_RES (14)..(14): Xaa is C or S
YYLMTLPEEETPVXE

SEQ ID NO: 7362 - protein, 16 aa, Artificial Sequence
  Cyclic GFR-binding peptide
  MOD_RES (14)..(15): Xaa is C or S
VKAMKVSRLETPVXXA

SEQ ID NO: 7363 - protein, 17 aa, Artificial Sequence
  Cyclic GFR-binding peptide
IVNSSDDIKRVQVPRLQ

SEQ ID NO: 7364 - protein, 17 aa, Artificial Sequence
  Cyclic GFR-binding peptide
  MOD_RES (14)..(14): Xaa is C or S
VKAMKVSREETPVXELG

SEQ ID NO: 7365 - protein, 27 aa, Artificial Sequence
  Cyclic GFR-binding peptide
  MOD_RES (21)..(22): Xaa is C or S
IVNSSDDYYLVTLPELKTPAXXPKPVY

SEQ ID NO: 7366 - protein, 14 aa, Artificial Sequence
  Cyclic GFR-binding peptide
  MOD_RES (14)..(14): Xaa is C or S
MIQVTINSLKTPAX

SEQ ID NO: 7367 - protein, 13 aa, Artificial Sequence
  Cyclic GFR-binding peptide
VKAVKVSRLQTPA

SEQ ID NO: 7368 - protein, 19 aa, Artificial Sequence
  Cyclic GFR-binding peptide
HQGQHPKIRVKAMKVSREE

SEQ ID NO: 7369 - protein, 19 aa, Artificial Sequence
  Cyclic GFR-binding peptide
VVKDYEDMIQMTINSLETP

SEQ ID NO: 7370 - protein, 15 aa, Artificial Sequence
  Cyclic GFR-binding peptide
  MOD_RES (14)..(15): Xaa is C or S
VKAVKVSRLQTPAXX

SEQ ID NO: 7371 - protein, 16 aa, Artificial Sequence
  Cyclic GFR-binding peptide
  MOD_RES (16)..(16): Xaa is C or S
IKRVQVPRHHVRSPQX

SEQ ID NO: 7372 - protein, 16 aa, Artificial Sequence
  Cyclic GFR-binding peptide
IVNSSDDVKAVKVSRL

SEQ ID NO: 7373 - protein, 29 aa, Artificial Sequence
  Cyclic GFR-binding peptide
  MOD_RES (25)..(25): Xaa is C or S
LKPKKRVYEMIQVTINSHHVRSPQXKVSS

SEQ ID NO: 7374 - protein, 16 aa, Artificial Sequence
  Cyclic GFR-binding peptide
  MOD_RES (16)..(16): Xaa is C or S
YYVVPLPELQVQTPRX

SEQ ID NO: 7375 - protein, 17 aa, Artificial Sequence
  Cyclic GFR-binding peptide
IVNSSDDVKAVKVSRLK

SEQ ID NO: 7376 - protein, 14 aa, Artificial Sequence
  Cyclic GFR-binding peptide
  MOD_RES (14)..(14): Xaa is C or S
YYVIPLPELDQSVX

SEQ ID NO: 7377 - protein, 17 aa, Artificial Sequence
  Cyclic GFR-binding peptide
  MOD_RES (14)..(15): Xaa is C or S
MIQITINSLDQPVXXPS

SEQ ID NO: 7378 - protein, 13 aa, Artificial Sequence
  Cyclic GFR-binding peptide
YYVMPLPELETPV

SEQ ID NO: 7379 - protein, 17 aa, Artificial Sequence
  Cyclic GFR-binding peptide
  MOD_RES (14)..(15): Xaa is C or S
YYLITLPELDQPVXXPS

SEQ ID NO: 7380 - protein, 17 aa, Artificial Sequence
  Cyclic GFR-binding peptide
IVNSSDDVKAVKVSRLQ

SEQ ID NO: 7381 - protein, 15 aa, Artificial Sequence
  Cyclic GFR-binding peptide
  MOD_RES (14)..(15): Xaa is C or S
YYVMPLPELETPVXX

SEQ ID NO: 7382 - protein, 13 aa, Artificial Sequence
  Cyclic GFR-binding peptide
IKRIQVPRLDQPV

SEQ ID NO: 7383 - protein, 29 aa, Artificial Sequence
  Cyclic GFR-binding peptide
  MOD_RES (25)..(25): Xaa is C or S
LKPKKRVYEIKRVQVPRHHVRSPQXKVSS

SEQ ID NO: 7384 - protein, 15 aa, Artificial Sequence
  Cyclic GFR-binding peptide
  MOD_RES (14)..(15): Xaa is C or S
IKRIQVPRLDQPVXX

SEQ ID NO: 7385 - protein, 20 aa, Artificial Sequence
  Cyclic GFR-binding peptide
  MOD_RES (14)..(15): Xaa is C or S
VKAMKVSRLETPVXXAKPIK

SEQ ID NO: 7386 - protein, 15 aa, Artificial Sequence
  Cyclic GFR-binding peptide
  MOD_RES (14)..(15): Xaa is C or S
MIQMTINSLETPVXX

SEQ ID NO: 7387 - protein, 20 aa, Artificial Sequence
  Cyclic GFR-binding peptide
  MOD_RES (14)..(15): Xaa is C or S
YYLITLPELDQPVXXPSASA

SEQ ID NO: 7388 - protein, 18 aa, Artificial Sequence
  Cyclic GFR-binding peptide
VVKENEDVKAMKVSRLET

SEQ ID NO: 7389 - protein, 16 aa, Artificial Sequence
  Cyclic GFR-binding peptide
VVKDYEDYYLMTLPEL

SEQ ID NO: 7390 - protein, 17 aa, Artificial Sequence
  Cyclic GFR-binding peptide
VKPTRGVIKRIQVPRLD

SEQ ID NO: 7391 - protein, 13 aa, Artificial Sequence
  Cyclic GFR-binding peptide
YYLMTLPEEETPV

SEQ ID NO: 7392 - protein, 16 aa, Artificial Sequence
  Cyclic GFR-binding peptide
VVKENEDYYVMPLPEL

SEQ ID NO: 7393 - protein, 14 aa, Artificial Sequence
  Cyclic GFR-binding peptide
  MOD_RES (14)..(14): Xaa is C or S
VKAMKVSREETPVX

SEQ ID NO: 7394 - protein, 18 aa, Artificial Sequence
  Cyclic GFR-binding peptide
VKPKRGVMIQITINSLAQ

SEQ ID NO: 7395 - protein, 21 aa, Artificial Sequence
  Cyclic GFR-binding peptide
LKPKKRVYEYYVVPLPEHHVR

SEQ ID NO: 7396 - protein, 16 aa, Artificial Sequence
  Cyclic GFR-binding peptide
IKPTKGIIKRIQVPRL

SEQ ID NO: 7397 - protein, 19 aa, Artificial Sequence
  Cyclic GFR-binding peptide
  MOD_RES (14)..(14): Xaa is C or S
YYLMTLPEEETPVXELGED

SEQ ID NO: 7398 - protein, 16 aa, Artificial Sequence
  Cyclic GFR-binding peptide
  MOD_RES (14)..(15): Xaa is C or S
VKAIKVSRLDQPVXXP

SEQ ID NO: 7399 - protein, 17 aa, Artificial Sequence
  Cyclic GFR-binding peptide
IVNSSDDYYVVPLPELQ

SEQ ID NO: 7400 - protein, 13 aa, Artificial Sequence
  Cyclic GFR-binding peptide
YYVIPLPELDQSV

SEQ ID NO: 7401 - protein, 15 aa, Artificial Sequence
  Cyclic GFR-binding peptide
VKPTRGVIKRIQVPR

SEQ ID NO: 7402 - protein, 14 aa, Artificial Sequence
  Cyclic GFR-binding peptide
YYVVPLPELQVQTP

SEQ ID NO: 7403 - protein, 17 aa, Artificial Sequence
  Cyclic GFR-binding peptide
  MOD_RES (14)..(15): Xaa is C or S
VKAVKVSRLQTPAXXPK

SEQ ID NO: 7404 - protein, 17 aa, Artificial Sequence
  Cyclic GFR-binding peptide
IKPTKGIYYVIPLPELD

SEQ ID NO: 7405 - protein, 16 aa, Artificial Sequence
  Cyclic GFR-binding peptide
VKPTRGVYYLITLPEL

SEQ ID NO: 7406 - protein, 15 aa, Artificial Sequence
  Cyclic GFR-binding peptide
  MOD_RES (14)..(15): Xaa is C or S
VKAIKVSRLDQPVXX

SEQ ID NO: 7407 - protein, 16 aa, Artificial Sequence
  Cyclic GFR-binding peptide
  MOD_RES (14)..(15): Xaa is C or S
YYLITLPELDQSVXXP

SEQ ID NO: 7408 - protein, 15 aa, Artificial Sequence
  Cyclic GFR-binding peptide
VKAVKVSRLQVQTPR

SEQ ID NO: 7409 - protein, 17 aa, Artificial Sequence
  Cyclic GFR-binding peptide
IVNSSDDYYVVPLPELK

SEQ ID NO: 7410 - protein, 19 aa, Artificial Sequence
  Cyclic GFR-binding peptide
  MOD_RES (14)..(15): Xaa is C or S
YYLVTLPELQTPAXXPKPV

SEQ ID NO: 7411 - protein, 14 aa, Artificial Sequence
  Cyclic GFR-binding peptide
  MOD_RES (14)..(14): Xaa is C or S
YYLMTLPELETPVX

SEQ ID NO: 7412 - protein, 19 aa, Artificial Sequence
  Cyclic GFR-binding peptide
  MOD_RES (14)..(15): Xaa is C or S
IKRMQVPRLETPVXXAKPI

SEQ ID NO: 7413 - protein, 18 aa, Artificial Sequence
  Cyclic GFR-binding peptide
  MOD_RES (16)..(16): Xaa is C or S
YYVVPLPEHHVRSPQXKV

SEQ ID NO: 7414 - protein, 15 aa, Artificial Sequence
  Cyclic GFR-binding peptide
IKRVQVPRHHVRSPQ

SEQ ID NO: 7415 - protein, 16 aa, Artificial Sequence
  Cyclic GFR-binding peptide
  MOD_RES (16)..(16): Xaa is C or S
YYVVPLPEHHVRSPQX

SEQ ID NO: 7416 - protein, 15 aa, Artificial Sequence
  Cyclic GFR-binding peptide
IKPTKGIYYVIPLPE

SEQ ID NO: 7417 - protein, 19 aa, Artificial Sequence
  Cyclic GFR-binding peptide
  MOD_RES (14)..(15): Xaa is C or S
MIQITINSLDQSVXXPSAS

SEQ ID NO: 7418 - protein, 20 aa, Artificial Sequence
  Cyclic GFR-binding peptide
  MOD_RES (16)..(16): Xaa is C or S
VKAVKVSRLQVQTPRXQVNR

SEQ ID NO: 7419 - protein, 17 aa, Artificial Sequence
  Cyclic GFR-binding peptide
  MOD_RES (14)..(14): Xaa is C or S
IKRMQVPREETPVXELG

SEQ ID NO: 7420 - protein, 27 aa, Artificial Sequence
  Cyclic GFR-binding peptide
  MOD_RES (21)..(22): Xaa is C or S
VKPTRGVYYVIPLPELDQPVXXPSASA

SEQ ID NO: 7421 - protein, 20 aa, Artificial Sequence
  Cyclic GFR-binding peptide
  MOD_RES (14)..(15): Xaa is C or S
YYLVTLPELKTPAXXPKPVY

SEQ ID NO: 7422 - protein, 14 aa, Artificial Sequence
  Cyclic GFR-binding peptide
  MOD_RES (14)..(14): Xaa is C or S
YYVMPLPELETPVX

SEQ ID NO: 7423 - protein, 19 aa, Artificial Sequence
  Cyclic GFR-binding peptide
VVKDYEDYYLMTLPELETP

SEQ ID NO: 7424 - protein, 18 aa, Artificial Sequence
  Cyclic GFR-binding peptide
LKPKKRVYEYYLVTLPEH

SEQ ID NO: 7425 - protein, 19 aa, Artificial Sequence
  Cyclic GFR-binding peptide
VKPTRGVYYLITLPELDQP

SEQ ID NO: 7426 - protein, 18 aa, Artificial Sequence
  Cyclic GFR-binding peptide
VKPKRGVVKAIKVSRLAQ

SEQ ID NO: 7427 - protein, 18 aa, Artificial Sequence
  Cyclic GFR-binding peptide
  MOD_RES (14)..(14): Xaa is C or S
VKAVKVSRLKTPAXTPKT

SEQ ID NO: 7428 - protein, 17 aa, Artificial Sequence
  Cyclic GFR-binding peptide
  MOD_RES (14)..(15): Xaa is C or S
IKRIQVPRLDQSVXXPS

SEQ ID NO: 7429 - protein, 19 aa, Artificial Sequence
  Cyclic GFR-binding peptide
  MOD_RES (14)..(15): Xaa is C or S
IKRIQVPRLDQPVXXPSAS

SEQ ID NO: 7430 - protein, 17 aa, Artificial Sequence
  Cyclic GFR-binding peptide
  MOD_RES (14)..(15): Xaa is C or S
YYVIPLPELDQPVXXPS

SEQ ID NO: 7431 - protein, 19 aa, Artificial Sequence
  Cyclic GFR-binding peptide
IKPTKGIMIQITINSLDQS

SEQ ID NO: 7432 - protein, 20 aa, Artificial Sequence
  Cyclic GFR-binding peptide
  MOD_RES (14)..(14): Xaa is C or S
VKAMKVSREETPVXELGEDN

SEQ ID NO: 7433 - protein, 16 aa, Artificial Sequence
  Cyclic GFR-binding peptide
  MOD_RES (14)..(14): Xaa is C or S
IKRMQVPREETPVXEL

SEQ ID NO: 7434 - protein, 16 aa, Artificial Sequence
  Cyclic GFR-binding peptide
  MOD_RES (14)..(14): Xaa is C or S
VKAVKVSRLKTPAXTP

SEQ ID NO: 7435 - protein, 18 aa, Artificial Sequence
  Cyclic GFR-binding peptide
  MOD_RES (16)..(16): Xaa is C or S
VKAVKVSRLQVQTPRXQV

SEQ ID NO: 7436 - protein, 18 aa, Artificial Sequence
  Cyclic GFR-binding peptide
IKPTKGIYYLITLPELDQ

SEQ ID NO: 7437 - protein, 27 aa, Artificial Sequence
  Cyclic GFR-binding peptide
  MOD_RES (21)..(22): Xaa is C or S
VVKDYEDMIQMTINSLETPVXXAKPIS

SEQ ID NO: 7438 - protein, 29 aa, Artificial Sequence
  Cyclic GFR-binding peptide
  MOD_RES (25)..(25): Xaa is C or S
LKPKKRVYEVKAVKVSRHHVRSPQXKVSS

SEQ ID NO: 7439 - protein, 18 aa, Artificial Sequence
  Cyclic GFR-binding peptide
VVKENEDMIQMTINSLET

SEQ ID NO: 7440 - protein, 27 aa, Artificial Sequence
  Cyclic GFR-binding peptide
  MOD_RES (21)..(22): Xaa is C or S
VVKENEDYYLMTLPELETPVXXAKPIK

SEQ ID NO: 7441 - protein, 21 aa, Artificial Sequence
  Cyclic GFR-binding peptide
HQGQHPKIRIKRMQVPREETP

SEQ ID NO: 7442 - protein, 16 aa, Artificial Sequence
  Cyclic GFR-binding peptide
  MOD_RES (14)..(15): Xaa is C or S
YYVIPLPELDQSVXXP

SEQ ID NO: 7443 - protein, 20 aa, Artificial Sequence
  Cyclic GFR-binding peptide
  MOD_RES (14)..(15): Xaa is C or S
YYLMTLPELETPVXXAKPIS

SEQ ID NO: 7444 - protein, 15 aa, Artificial Sequence
  Cyclic GFR-binding peptide
VKPKRGVMIQITINS

SEQ ID NO: 7445 - protein, 15 aa, Artificial Sequence
  Cyclic GFR-binding peptide
VVKENEDVKAMKVSR

SEQ ID NO: 7446 - protein, 17 aa, Artificial Sequence
  Cyclic GFR-binding peptide
  MOD_RES (14)..(14): Xaa is C or S
YYLMTLPEEETPVXELG

SEQ ID NO: 7447 - protein, 18 aa, Artificial Sequence
  Cyclic GFR-binding peptide
  MOD_RES (14)..(14): Xaa is C or S
YYLMTLPEEETPVXELGE

SEQ ID NO: 7448 - protein, 18 aa, Artificial Sequence
  Cyclic GFR-binding peptide
  MOD_RES (14)..(15): Xaa is C or S
VKAVKVSRLKTPAXXPKP

SEQ ID NO: 7449 - protein, 15 aa, Artificial Sequence
  Cyclic GFR-binding peptide
YYLVTLPEHHVRSPQ

SEQ ID NO: 7450 - protein, 16 aa, Artificial Sequence
  Cyclic GFR-binding peptide
  MOD_RES (14)..(15): Xaa is C or S
IKRVQVPRLKTPAXXP

SEQ ID NO: 7451 - protein, 13 aa, Artificial Sequence
  Cyclic GFR-binding peptide
VKAIKVSRLDQPV

SEQ ID NO: 7452 - protein, 17 aa, Artificial Sequence
  Cyclic GFR-binding peptide
VVKENEDIKRMQVPRLE

SEQ ID NO: 7453 - protein, 15 aa, Artificial Sequence
  Cyclic GFR-binding peptide
  MOD_RES (14)..(15): Xaa is C or S
YYVIPLPELDQSVXX

SEQ ID NO: 7454 - protein, 27 aa, Artificial Sequence
  Cyclic GFR-binding peptide
  MOD_RES (21)..(22): Xaa is C or S
VKPKRGVYYVIPLPELAQPVXXPAASA

SEQ ID NO: 7455 - protein, 20 aa, Artificial Sequence
  Cyclic GFR-binding peptide
  MOD_RES (14)..(15): Xaa is C or S
YYLVTLPELQTPAXXPKPVT

SEQ ID NO: 7456 - protein, 29 aa, Artificial Sequence
  Cyclic GFR-binding peptide
  MOD_RES (23)..(23): Xaa is C or S
HQGQHPKIRYYLMTLPEEETPVXELGEDN

SEQ ID NO: 7457 - protein, 18 aa, Artificial Sequence
  Cyclic GFR-binding peptide
VKPTRGVYYVIPLPELDQ

SEQ ID NO: 7458 - protein, 13 aa, Artificial Sequence
  Cyclic GFR-binding peptide
MIQVTINSHHVRS

SEQ ID NO: 7459 - protein, 15 aa, Artificial Sequence
  Cyclic GFR-binding peptide
VVKDYEDVKAMKVSR

SEQ ID NO: 7460 - protein, 20 aa, Artificial Sequence
  Cyclic GFR-binding peptide
  MOD_RES (14)..(15): Xaa is C or S
MIQVTINSLQTPAXXPKPVT

SEQ ID NO: 7461 - protein, 19 aa, Artificial Sequence
  Cyclic GFR-binding peptide
IKPTKGIVKAIKVSRLDQS

SEQ ID NO: 7462 - protein, 18 aa, Artificial Sequence
  Cyclic GFR-binding peptide
LKPKKRVYEYYVVPLPEH

SEQ ID NO: 7463 - protein, 27 aa, Artificial Sequence
  Cyclic GFR-binding peptide
  MOD_RES (21)..(21): Xaa is C or S
IVNSSDDYYVVPLPELKTPAXTPKTVH

SEQ ID NO: 7464 - protein, 18 aa, Artificial Sequence
  Cyclic GFR-binding peptide
LKPKKRVYEVKAVKVSRH

SEQ ID NO: 7465 - protein, 15 aa, Artificial Sequence
  Cyclic GFR-binding peptide
IVNSSDDIKRVQVPR

SEQ ID NO: 7466 - protein, 20 aa, Artificial Sequence
  Cyclic GFR-binding peptide
  MOD_RES (16)..(16): Xaa is C or S
MIQVTINSHHVRSPQXKVSS

SEQ ID NO: 7467 - protein, 20 aa, Artificial Sequence
  Cyclic GFR-binding peptide
  MOD_RES (14)..(14): Xaa is C or S
YYVMPLPEEETPVXELGEDN

SEQ ID NO: 7468 - protein, 19 aa, Artificial Sequence
  Cyclic GFR-binding peptide
  MOD_RES (14)..(15): Xaa is C or S
YYLITLPELAQPVXXPAAS

SEQ ID NO: 7469 - protein, 16 aa, Artificial Sequence
  Cyclic GFR-binding peptide
IVNSSDDYYVVPLPEL

SEQ ID NO: 7470 - protein, 19 aa, Artificial Sequence
  Cyclic GFR-binding peptide
  MOD_RES (14)..(14): Xaa is C or S
IKRMQVPREETPVXELGED

SEQ ID NO: 7471 - protein, 13 aa, Artificial Sequence
  Cyclic GFR-binding peptide
IKRMQVPREETPV

SEQ ID NO: 7472 - protein, 18 aa, Artificial Sequence
  Cyclic GFR-binding peptide
  MOD_RES (16)..(16): Xaa is C or S
MIQVTINSHHVRSPQXKV

SEQ ID NO: 7473 - protein, 16 aa, Artificial Sequence
  Cyclic GFR-binding peptide
  MOD_RES (14)..(15): Xaa is C or S
VKAVKVSRLKTPAXXP

SEQ ID NO: 7474 - protein, 18 aa, Artificial Sequence
  Cyclic GFR-binding peptide
  MOD_RES (14)..(14): Xaa is C or S
YYVMPLPEEETPVXELGE

SEQ ID NO: 7475 - protein, 17 aa, Artificial Sequence
  Cyclic GFR-binding peptide
  MOD_RES (14)..(15): Xaa is C or S
MIQITINSLDQSVXXPS

SEQ ID NO: 7476 - protein, 17 aa, Artificial Sequence
  Cyclic GFR-binding peptide
VVKDYEDYYLMTLPELE

SEQ ID NO: 7477 - protein, 16 aa, Artificial Sequence
  Cyclic GFR-binding peptide
  MOD_RES (14)..(14): Xaa is C or S
IKRVQVPRLKTPAXTP

SEQ ID NO: 7478 - protein, 14 aa, Artificial Sequence
  Cyclic GFR-binding peptide
YYLVTLPEHHVRSP

SEQ ID NO: 7479 - protein, 18 aa, Artificial Sequence
  Cyclic GFR-binding peptide
VKPTRGVVKAIKVSRLDQ

SEQ ID NO: 7480 - protein, 15 aa, Artificial Sequence
  Cyclic GFR-binding peptide
YYVVPLPEHHVRSPQ

SEQ ID NO: 7481 - protein, 16 aa, Artificial Sequence
  Cyclic GFR-binding peptide
  MOD_RES (14)..(15): Xaa is C or S
VKAVKVSRLQTPAXXP

SEQ ID NO: 7482 - protein, 15 aa, Artificial Sequence
  Cyclic GFR-binding peptide
  MOD_RES (14)..(15): Xaa is C or S
VKAIKVSRLAQPVXX

SEQ ID NO: 7483 - protein, 16 aa, Artificial Sequence
  Cyclic GFR-binding peptide
  MOD_RES (16)..(16): Xaa is C or S
VKAVKVSRLQVQTPRX

SEQ ID NO: 7484 - protein, 13 aa, Artificial Sequence
  Cyclic GFR-binding peptide
MIQMTINSLETPV

SEQ ID NO: 7485 - protein, 14 aa, Artificial Sequence
  Cyclic GFR-binding peptide
VKAVKVSRLQVQTP

SEQ ID NO: 7486 - protein, 13 aa, Artificial Sequence
  Cyclic GFR-binding peptide
IKRVQVPRHHVRS

SEQ ID NO: 7487 - protein, 17 aa, Artificial Sequence
  Cyclic GFR-binding peptide
  MOD_RES (14)..(15): Xaa is C or S
YYLITLPELDQSVXXPS

SEQ ID NO: 7488 - protein, 29 aa, Artificial Sequence
  Cyclic GFR-binding peptide
  MOD_RES (25)..(25): Xaa is C or S
FIPKKRVIEYYVVPLPELQVQTPRXQVNR

SEQ ID NO: 7489 - protein, 15 aa, Artificial Sequence
  Cyclic GFR-binding peptide
VKPKRGVYYVIPLPE

SEQ ID NO: 7490 - protein, 18 aa, Artificial Sequence
  Cyclic GFR-binding peptide
  MOD_RES (16)..(16): Xaa is C or S
YYLVTLPEHHVRSPQXKV

SEQ ID NO: 7491 - protein, 15 aa, Artificial Sequence
  Cyclic GFR-binding peptide
  MOD_RES (14)..(15): Xaa is C or S
IKRIQVPRLDQSVXX

SEQ ID NO: 7492 - protein, 20 aa, Artificial Sequence
  Cyclic GFR-binding peptide
  MOD_RES (16)..(16): Xaa is C or S
YYVVPLPEHHVRSPQXKVSS

SEQ ID NO: 7493 - protein, 20 aa, Artificial Sequence
  Cyclic GFR-binding peptide
  MOD_RES (14)..(15): Xaa is C or S
IKRVQVPRLKTPAXXPKPVY

SEQ ID NO: 7494 - protein, 16 aa, Artificial Sequence
  Cyclic GFR-binding peptide
  MOD_RES (14)..(15): Xaa is C or S
IKRIQVPRLDQPVXXP

SEQ ID NO: 7495 - protein, 17 aa, Artificial Sequence
  Cyclic GFR-binding peptide
  MOD_RES (16)..(16): Xaa is C or S
MIQVTINSLQVQTPRXQ

SEQ ID NO: 7496 - protein, 20 aa, Artificial Sequence
  Cyclic GFR-binding peptide
FIPKKRVIEYYVVPLPELQV

SEQ ID NO: 7497 - protein, 18 aa, Artificial Sequence
  Cyclic GFR-binding peptide
  MOD_RES (14)..(14): Xaa is C or S
IKRMQVPREETPVXELGE

SEQ ID NO: 7498 - protein, 20 aa, Artificial Sequence
  Cyclic GFR-binding peptide
FIPKKRVIEMIQVTINSLQV

SEQ ID NO: 7499 - protein, 15 aa, Artificial Sequence
  Cyclic GFR-binding peptide
VVKENEDYYLMTLPE

SEQ ID NO: 7500 - protein, 15 aa, Artificial Sequence
  Cyclic GFR-binding peptide
VVKDYEDMIQMTINS

SEQ ID NO: 7501 - protein, 18 aa, Artificial Sequence
  Cyclic GFR-binding peptide
IVNSSDDYYLVTLPELQT

SEQ ID NO: 7502 - protein, 20 aa, Artificial Sequence
  Cyclic GFR-binding peptide
  MOD_RES (14)..(15): Xaa is C or S
MIQITINSLDQPVXXPSASA

SEQ ID NO: 7503 - protein, 14 aa, Artificial Sequence
  Cyclic GFR-binding peptide
  MOD_RES (14)..(14): Xaa is C or S
VKAIKVSRLDQSVX

SEQ ID NO: 7504 - protein, 27 aa, Artificial Sequence
  Cyclic GFR-binding peptide
  MOD_RES (21)..(22): Xaa is C or S
IVNSSDDIKRVQVPRLKTPAXXPKPVY

SEQ ID NO: 7505 - protein, 13 aa, Artificial Sequence
  Cyclic GFR-binding peptide
IKRIQVPRLDQSV

SEQ ID NO: 7506 - protein, 19 aa, Artificial Sequence
  Cyclic GFR-binding peptide
  MOD_RES (14)..(15): Xaa is C or S
MIQITINSLAQPVXXPAAS

SEQ ID NO: 7507 - protein, 18 aa, Artificial Sequence
  Cyclic GFR-binding peptide
VKPTRGVMIQITINSLDQ

SEQ ID NO: 7508 - protein, 19 aa, Artificial Sequence
  Cyclic GFR-binding peptide
  MOD_RES (14)..(15): Xaa is C or S
YYVMPLPELETPVXXAKPI

SEQ ID NO: 7509 - protein, 18 aa, Artificial Sequence
  Cyclic GFR-binding peptide
IVNSSDDYYLVTLPELKT

SEQ ID NO: 7510 - protein, 15 aa, Artificial Sequence
  Cyclic GFR-binding peptide
IKPTKGIMIQITINS

SEQ ID NO: 7511 - protein, 19 aa, Artificial Sequence
  Cyclic GFR-binding peptide
  MOD_RES (14)..(14): Xaa is C or S
YYVMPLPEEETPVXELGED

SEQ ID NO: 7512 - protein, 17 aa, Artificial Sequence
  Cyclic GFR-binding peptide
  MOD_RES (14)..(15): Xaa is C or S
IKRIQVPRLDQPVXXPS

SEQ ID NO: 7513 - protein, 20 aa, Artificial Sequence
  Cyclic GFR-binding peptide
  MOD_RES (14)..(14): Xaa is C or S
IKRMQVPREETPVXELGEDN

SEQ ID NO: 7514 - protein, 19 aa, Artificial Sequence
  Cyclic GFR-binding peptide
LKPKKRVYEIKRVQVPRHH

SEQ ID NO: 7515 - protein, 18 aa, Artificial Sequence
  Cyclic GFR-binding peptide
  MOD_RES (14)..(15): Xaa is C or S
VKAIKVSRLAQPVXXPAA

SEQ ID NO: 7516 - protein, 13 aa, Artificial Sequence
  Cyclic GFR-binding peptide
YYVMPLPEEETPV

SEQ ID NO: 7517 - protein, 13 aa, Artificial Sequence
  Cyclic GFR-binding peptide
VKAIKVSRLAQPV

SEQ ID NO: 7518 - protein, 16 aa, Artificial Sequence
  Cyclic GFR-binding peptide
VKPKRGVYYLITLPEL

SEQ ID NO: 7519 - protein, 15 aa, Artificial Sequence
  Cyclic GFR-binding peptide
  MOD_RES (14)..(14): Xaa is C or S
YYLVTLPELKTPAXT

SEQ ID NO: 7520 - protein, 16 aa, Artificial Sequence
  Cyclic GFR-binding peptide
  MOD_RES (14)..(14): Xaa is C or S
VKAMKVSREETPVXEL

SEQ ID NO: 7521 - protein, 19 aa, Artificial Sequence
  Cyclic GFR-binding peptide
VVKENEDIKRMQVPRLETP

SEQ ID NO: 7522 - protein, 13 aa, Artificial Sequence
  Cyclic GFR-binding peptide
YYVVPLPEHHVRS

SEQ ID NO: 7523 - protein, 19 aa, Artificial Sequence
  Cyclic GFR-binding peptide
  MOD_RES (14)..(15): Xaa is C or S
YYVIPLPELDQSVXXPSAS

SEQ ID NO: 7524 - protein, 19 aa, Artificial Sequence
  Cyclic GFR-binding peptide
VKPKRGVIKRIQVPRLAQP

SEQ ID NO: 7525 - protein, 18 aa, Artificial Sequence
  Cyclic GFR-binding peptide
VVKDYEDYYVMPLPELET

SEQ ID NO: 7526 - protein, 16 aa, Artificial Sequence
  Cyclic GFR-binding peptide
  MOD_RES (16)..(16): Xaa is C or S
YYLVTLPEHHVRSPQX

SEQ ID NO: 7527 - protein, 27 aa, Artificial Sequence
  Cyclic GFR-binding peptide
  MOD_RES (21)..(22): Xaa is C or S
IVNSSDDYYLVTLPELQTPAXXPKPVT

SEQ ID NO: 7528 - protein, 16 aa, Artificial Sequence
  Cyclic GFR-binding peptide
  MOD_RES (16)..(16): Xaa is C or S
MIQVTINSHHVRSPQX

SEQ ID NO: 7529 - protein, 19 aa, Artificial Sequence
  Cyclic GFR-binding peptide
  MOD_RES (14)..(15): Xaa is C or S
VKAIKVSRLDQPVXXPSAS

SEQ ID NO: 7530 - protein, 19 aa, Artificial Sequence
  Cyclic GFR-binding peptide
FIPKKRVIEYYVVPLPELQ

SEQ ID NO: 7531 - protein, 20 aa, Artificial Sequence
  Cyclic GFR-binding peptide
  MOD_RES (14)..(15): Xaa is C or S
YYVVPLPELKTPAXXPKPVY

SEQ ID NO: 7532 - protein, 18 aa, Artificial Sequence
  Cyclic GFR-binding peptide
LKPKKRVYEMIQVTINSH

SEQ ID NO: 7533 - protein, 17 aa, Artificial Sequence
  Cyclic GFR-binding peptide
  MOD_RES (14)..(14): Xaa is C or S
YYVMPLPEEETPVXELG

SEQ ID NO: 7534 - protein, 13 aa, Artificial Sequence
  Cyclic GFR-binding peptide
VKAVKVSRLQVQT

SEQ ID NO: 7535 - protein, 27 aa, Artificial Sequence
  Cyclic GFR-binding peptide
  MOD_RES (21)..(22): Xaa is C or S
VVKENEDVKAMKVSRLETPVXXAKPIK

SEQ ID NO: 7536 - protein, 27 aa, Artificial Sequence
  Cyclic GFR-binding peptide
  MOD_RES (21)..(22): Xaa is C or S
IVNSSDDMIQVTINSLQTPAXXPKPVT

SEQ ID NO: 7537 - protein, 18 aa, Artificial Sequence
  Cyclic GFR-binding peptide
VKPKRGVYYVIPLPELAQ

SEQ ID NO: 7538 - protein, 16 aa, Artificial Sequence
  Cyclic GFR-binding peptide
  MOD_RES (14)..(15): Xaa is C or S
IKRIQVPRLAQPVXXP

SEQ ID NO: 7539 - protein, 27 aa, Artificial Sequence
  Cyclic GFR-binding peptide
  MOD_RES (21)..(22): Xaa is C or S
VKPTRGVVKAIKVSRLDQPVXXPSASA

SEQ ID NO: 7540 - protein, 17 aa, Artificial Sequence
  Cyclic GFR-binding peptide
VVKDYEDMIQMTINSLE

SEQ ID NO: 7541 - protein, 20 aa, Artificial Sequence
  Cyclic GFR-binding peptide
  MOD_RES (14)..(15): Xaa is C or S
MIQMTINSLETPVXXAKPIS

SEQ ID NO: 7542 - protein, 21 aa, Artificial Sequence
  Cyclic GFR-binding peptide
FIPKKRVIEIKRVQVPRLQVQ

SEQ ID NO: 7543 - protein, 18 aa, Artificial Sequence
  Cyclic GFR-binding peptide
FIPKKRVIEIKRVQVPRL

SEQ ID NO: 7544 - protein, 21 aa, Artificial Sequence
  Cyclic GFR-binding peptide
HQGQHPKIRYYLMTLPEEETP

SEQ ID NO: 7545 - protein, 18 aa, Artificial Sequence
  Cyclic GFR-binding peptide
HQGQHPKIRIKRMQVPRE

SEQ ID NO: 7546 - protein, 20 aa, Artificial Sequence
  Cyclic GFR-binding peptide
  MOD_RES (14)..(15): Xaa is C or S
VKAIKVSRLDQPVXXPSASA

SEQ ID NO: 7547 - protein, 17 aa, Artificial Sequence
  Cyclic GFR-binding peptide
  MOD_RES (14)..(15): Xaa is C or S
VKAVKVSRLKTPAXXPK

SEQ ID NO: 7548 - protein, 19 aa, Artificial Sequence
  Cyclic GFR-binding peptide
  MOD_RES (14)..(15): Xaa is C or S
IKRIQVPRLDQSVXXPSAS

SEQ ID NO: 7549 - protein, 19 aa, Artificial Sequence
  Cyclic GFR-binding peptide
VVKENEDVKAMKVSRLETP

SEQ ID NO: 7550 - protein, 15 aa, Artificial Sequence
  Cyclic GFR-binding peptide
  MOD_RES (14)..(14): Xaa is C or S
MIQVTINSLKTPAXT

SEQ ID NO: 7551 - protein, 19 aa, Artificial Sequence
  Cyclic GFR-binding peptide
IKPTKGIYYVIPLPELDQS

SEQ ID NO: 7552 - protein, 20 aa, Artificial Sequence
  Cyclic GFR-binding peptide
  MOD_RES (14)..(15): Xaa is C or S
VKAIKVSRLAQPVXXPAASA

SEQ ID NO: 7553 - protein, 27 aa, Artificial Sequence
  Cyclic GFR-binding peptide
  MOD_RES (21)..(22): Xaa is C or S
IVNSSDDMIQVTINSLKTPAXXPKPVY

SEQ ID NO: 7554 - protein, 19 aa, Artificial Sequence
  Cyclic GFR-binding peptide
VKPKRGVMIQITINSLAQP

SEQ ID NO: 7555 - protein, 18 aa, Artificial Sequence
  Cyclic GFR-binding peptide
  MOD_RES (14)..(15): Xaa is C or S
YYLVTLPELKTPAXXPKP

SEQ ID NO: 7556 - protein, 13 aa, Artificial Sequence
  Cyclic GFR-binding peptide
IKRVQVPRLQTPA

SEQ ID NO: 7557 - protein, 13 aa, Artificial Sequence
  Cyclic GFR-binding peptide
MIQVTINSLKTPA

SEQ ID NO: 7558 - protein, 27 aa, Artificial Sequence
  Cyclic GFR-binding peptide
  MOD_RES (21)..(22): Xaa is C or S
VVKENEDIKRMQVPRLETPVXXAKPIK

SEQ ID NO: 7559 - protein, 15 aa, Artificial Sequence
  Cyclic GFR-binding peptide
  MOD_RES (14)..(15): Xaa is C or S
IKRIQVPRLAQPVXX

SEQ ID NO: 7560 - protein, 14 aa, Artificial Sequence
  Cyclic GFR-binding peptide
  MOD_RES (14)..(14): Xaa is C or S
VKAMKVSRLETPVX

SEQ ID NO: 7561 - protein, 18 aa, Artificial Sequence
  Cyclic GFR-binding peptide
  MOD_RES (14)..(15): Xaa is C or S
YYVMPLPELETPVXXAKP

SEQ ID NO: 7562 - protein, 29 aa, Artificial Sequence
  Cyclic GFR-binding peptide
  MOD_RES (23)..(23): Xaa is C or S
HQGQHPKIRVKAMKVSREETPVXELGEDN

SEQ ID NO: 7563 - protein, 18 aa, Artificial Sequence
  Cyclic GFR-binding peptide
VVKENEDYYVMPLPELET

SEQ ID NO: 7564 - protein, 17 aa, Artificial Sequence
  Cyclic GFR-binding peptide
IKPTKGIIKRIQVPRLD

SEQ ID NO: 7565 - protein, 14 aa, Artificial Sequence
  Cyclic GFR-binding peptide
  MOD_RES (14)..(14): Xaa is C or S
MIQITINSLAQPVX

SEQ ID NO: 7566 - protein, 18 aa, Artificial Sequence
  Cyclic GFR-binding peptide
  MOD_RES (14)..(15): Xaa is C or S
YYVIPLPELDQSVXXPSA

SEQ ID NO: 7567 - protein, 20 aa, Artificial Sequence
  Cyclic GFR-binding peptide
  MOD_RES (14)..(15): Xaa is C or S
MIQVTINSLKTPAXXPKPVY

SEQ ID NO: 7568 - protein, 17 aa, Artificial Sequence
  Cyclic GFR-binding peptide
VVKENEDYYLMTLPELE

SEQ ID NO: 7569 - protein, 18 aa, Artificial Sequence
  Cyclic GFR-binding peptide
  MOD_RES (14)..(15): Xaa is C or S
IKRIQVPRLDQPVXXPSA

SEQ ID NO: 7570 - protein, 17 aa, Artificial Sequence
  Cyclic GFR-binding peptide
IKPTKGIVKAIKVSRLD

SEQ ID NO: 7571 - protein, 17 aa, Artificial Sequence
  Cyclic GFR-binding peptide
  MOD_RES (16)..(16): Xaa is C or S
YYLVTLPELQVQTPRXQ

SEQ ID NO: 7572 - protein, 18 aa, Artificial Sequence
  Cyclic GFR-binding peptide
  MOD_RES (16)..(16): Xaa is C or S
YYLVTLPELQVQTPRXQV

SEQ ID NO: 7573 - protein, 16 aa, Artificial Sequence
  Cyclic GFR-binding peptide
VKPKRGVMIQITINSL

SEQ ID NO: 7574 - protein, 17 aa, Artificial Sequence
  Cyclic GFR-binding peptide
VKPTRGVYYLITLPELD

SEQ ID NO: 7575 - protein, 29 aa, Artificial Sequence
  Cyclic GFR-binding peptide
  MOD_RES (23)..(23): Xaa is C or S
HQGQHPKIRMIQMTINSEETPVXELGEDN

SEQ ID NO: 7576 - protein, 16 aa, Artificial Sequence
  Cyclic GFR-binding peptide
  MOD_RES (16)..(16): Xaa is C or S
MIQVTINSLQVQTPRX

SEQ ID NO: 7577 - protein, 18 aa, Artificial Sequence
  Cyclic GFR-binding peptide
IVNSSDDMIQVTINSLKT

SEQ ID NO: 7578 - protein, 16 aa, Artificial Sequence
  Cyclic GFR-binding peptide
  MOD_RES (14)..(15): Xaa is C or S
MIQITINSLDQSVXXP

SEQ ID NO: 7579 - protein, 20 aa, Artificial Sequence
  Cyclic GFR-binding peptide
  MOD_RES (16)..(16): Xaa is C or S
YYLVTLPELQVQTPRXQVNR

SEQ ID NO: 7580 - protein, 16 aa, Artificial Sequence
  Cyclic GFR-binding peptide
VKPTRGVVKAIKVSRL

SEQ ID NO: 7581 - protein, 18 aa, Artificial Sequence
  Cyclic GFR-binding peptide
  MOD_RES (14)..(15): Xaa is C or S
IKRIQVPRLAQPVXXPAA

SEQ ID NO: 7582 - protein, 13 aa, Artificial Sequence
  Cyclic GFR-binding peptide
YYLITLPELAQPV

SEQ ID NO: 7583 - protein, 20 aa, Artificial Sequence
  Cyclic GFR-binding peptide
LKPKKRVYEIKRVQVPRHHV

SEQ ID NO: 7584 - protein, 17 aa, Artificial Sequence
  Cyclic GFR-binding peptide
HQGQHPKIRYYLMTLPE

SEQ ID NO: 7585 - protein, 14 aa, Artificial Sequence
  Cyclic GFR-binding peptide
  MOD_RES (14)..(14): Xaa is C or S
MIQVTINSLQTPAX

SEQ ID NO: 7586 - protein, 18 aa, Artificial Sequence
  Cyclic GFR-binding peptide
IVNSSDDMIQVTINSLQT

SEQ ID NO: 7587 - protein, 27 aa, Artificial Sequence
  Cyclic GFR-binding peptide
  MOD_RES (21)..(22): Xaa is C or S
VKPTRGVMIQITINSLDQPVXXPSASA

SEQ ID NO: 7588 - protein, 15 aa, Artificial Sequence
  Cyclic GFR-binding peptide
VKPTRGVYYVIPLPE

SEQ ID NO: 7589 - protein, 19 aa, Artificial Sequence
  Cyclic GFR-binding peptide
  MOD_RES (14)..(15): Xaa is C or S
MIQITINSLDQPVXXPSAS

SEQ ID NO: 7590 - protein, 16 aa, Artificial Sequence
  Cyclic GFR-binding peptide
VKPTRGVIKRIQVPRL

SEQ ID NO: 7591 - protein, 13 aa, Artificial Sequence
  Cyclic GFR-binding peptide
YYLVTLPELQTPA

SEQ ID NO: 7592 - protein, 15 aa, Artificial Sequence
  Cyclic GFR-binding peptide
VVKDYEDYYVMPLPE

SEQ ID NO: 7593 - protein, 17 aa, Artificial Sequence
  Cyclic GFR-binding peptide
  MOD_RES (14)..(15): Xaa is C or S
VKAIKVSRLAQPVXXPA

SEQ ID NO: 7594 - protein, 20 aa, Artificial Sequence
  Cyclic GFR-binding peptide
  MOD_RES (16)..(16): Xaa is C or S
IKRVQVPRHHVRSPQXKVSS

SEQ ID NO: 7595 - protein, 13 aa, Artificial Sequence
  Cyclic GFR-binding peptide
YYLVTLPEHHVRS

SEQ ID NO: 7596 - protein, 20 aa, Artificial Sequence
  Cyclic GFR-binding peptide
HQGQHPKIRIKRMQVPREET

SEQ ID NO: 7597 - protein, 16 aa, Artificial Sequence
  Cyclic GFR-binding peptide
  MOD_RES (14)..(15): Xaa is C or S
MIQMTINSLETPVXXA

SEQ ID NO: 7598 - protein, 19 aa, Artificial Sequence
  Cyclic GFR-binding peptide
  MOD_RES (14)..(15): Xaa is C or S
MIQVTINSLQTPAXXPKPV

SEQ ID NO: 7599 - protein, 17 aa, Artificial Sequence
  Cyclic GFR-binding peptide
VKPKRGVIKRIQVPRLA

SEQ ID NO: 7600 - protein, 18 aa, Artificial Sequence
  Cyclic GFR-binding peptide
  MOD_RES (14)..(15): Xaa is C or S
YYVVPLPELKTPAXXPKP

SEQ ID NO: 7601 - protein, 19 aa, Artificial Sequence
  Cyclic GFR-binding peptide
FIPKKRVIEMIQVTINSLQ

SEQ ID NO: 7602 - protein, 27 aa, Artificial Sequence
  Cyclic GFR-binding peptide
  MOD_RES (21)..(22): Xaa is C or S
VKPTRGVIKRIQVPRLDQPVXXPSASA

SEQ ID NO: 7603 - protein, 19 aa, Artificial Sequence
  Cyclic GFR-binding peptide
IVNSSDDVKAVKVSRLQTP

SEQ ID NO: 7604 - protein, 17 aa, Artificial Sequence
  Cyclic GFR-binding peptide
  MOD_RES (14)..(15): Xaa is C or S
VKAIKVSRLDQPVXXPS

SEQ ID NO: 7605 - protein, 17 aa, Artificial Sequence
  Cyclic GFR-binding peptide
  MOD_RES (14)..(15): Xaa is C or S
VKAMKVSRLETPVXXAK

SEQ ID NO: 7606 - protein, 20 aa, Artificial Sequence
  Cyclic GFR-binding peptide
  MOD_RES (14)..(15): Xaa is C or S
IKRVQVPRLQTPAXXPKPVT

SEQ ID NO: 7607 - protein, 16 aa, Artificial Sequence
  Cyclic GFR-binding peptide
  MOD_RES (14)..(15): Xaa is C or S
MIQVTINSLKTPAXXP

SEQ ID NO: 7608 - protein, 19 aa, Artificial Sequence
  Cyclic GFR-binding peptide
VVKDYEDYYVMPLPELETP

SEQ ID NO: 7609 - protein, 15 aa, Artificial Sequence
  Cyclic GFR-binding peptide
IVNSSDDYYLVTLPE

SEQ ID NO: 7610 - protein, 19 aa, Artificial Sequence
  Cyclic GFR-binding peptide
  MOD_RES (14)..(15): Xaa is C or S
IKRVQVPRLQTPAXXPKPV

SEQ ID NO: 7611 - protein, 20 aa, Artificial Sequence
  Cyclic GFR-binding peptide
  MOD_RES (16)..(16): Xaa is C or S
YYLVTLPEHHVRSPQXKVSS

SEQ ID NO: 7612 - protein, 27 aa, Artificial Sequence
  Cyclic GFR-binding peptide
  MOD_RES (21)..(22): Xaa is C or S
IKPTKGIYYVIPLPELDQSVXXPSASA

SEQ ID NO: 7613 - protein, 19 aa, Artificial Sequence
  Cyclic GFR-binding peptide
  MOD_RES (16)..(16): Xaa is C or S
VKAVKVSRLQVQTPRXQVN

SEQ ID NO: 7614 - protein, 16 aa, Artificial Sequence
  Cyclic GFR-binding peptide
  MOD_RES (14)..(15): Xaa is C or S
YYLITLPELAQPVXXP

SEQ ID NO: 7615 - protein, 15 aa, Artificial Sequence
  Cyclic GFR-binding peptide
  MOD_RES (14)..(15): Xaa is C or S
MIQVTINSLQTPAXX

SEQ ID NO: 7616 - protein, 16 aa, Artificial Sequence
  Cyclic GFR-binding peptide
VKPKRGVIKRIQVPRL

SEQ ID NO: 7617 - protein, 16 aa, Artificial Sequence
  Cyclic GFR-binding peptide
VKPTRGVMIQITINSL

SEQ ID NO: 7618 - protein, 16 aa, Artificial Sequence
  Cyclic GFR-binding peptide
  MOD_RES (14)..(15): Xaa is C or S
IKRIQVPRLDQSVXXP

SEQ ID NO: 7619 - protein, 19 aa, Artificial Sequence
  Cyclic GFR-binding peptide
  MOD_RES (14)..(14): Xaa is C or S
VKAVKVSRLKTPAXTPKTV

SEQ ID NO: 7620 - protein, 18 aa, Artificial Sequence
  Cyclic GFR-binding peptide
  MOD_RES (14)..(15): Xaa is C or S
MIQITINSLAQPVXXPAA

SEQ ID NO: 7621 - protein, 18 aa, Artificial Sequence
  Cyclic GFR-binding peptide
IVNSSDDVKAVKVSRLKT

SEQ ID NO: 7622 - protein, 18 aa, Artificial Sequence
  Cyclic GFR-binding peptide
IVNSSDDVKAVKVSRLQT

SEQ ID NO: 7623 - protein, 13 aa, Artificial Sequence
  Cyclic GFR-binding peptide
MIQITINSLDQSV

SEQ ID NO: 7624 - protein, 27 aa, Artificial Sequence
  Cyclic GFR-binding peptide
  MOD_RES (21)..(21): Xaa is C or S
IVNSSDDVKAVKVSRLKTPAXTPKTVH

SEQ ID NO: 7625 - protein, 19 aa, Artificial Sequence
  Cyclic GFR-binding peptide
IVNSSDDVKAVKVSRLKTP

SEQ ID NO: 7626 - protein, 18 aa, Artificial Sequence
  Cyclic GFR-binding peptide
  MOD_RES (16)..(16): Xaa is C or S
YYVVPLPELQVQTPRXQV

SEQ ID NO: 7627 - protein, 18 aa, Artificial Sequence
  Cyclic GFR-binding peptide
  MOD_RES (14)..(15): Xaa is C or S
VKAIKVSRLDQSVXXPSA

SEQ ID NO: 7628 - protein, 19 aa, Artificial Sequence
  Cyclic GFR-binding peptide
  MOD_RES (16)..(16): Xaa is C or S
YYVVPLPEHHVRSPQXKVS

SEQ ID NO: 7629 - protein, 18 aa, Artificial Sequence
  Cyclic GFR-binding peptide
IVNSSDDIKRVQVPRLQT

SEQ ID NO: 7630 - protein, 18 aa, Artificial Sequence
  Cyclic GFR-binding peptide
IVNSSDDIKRVQVPRLKT

SEQ ID NO: 7631 - protein, 19 aa, Artificial Sequence
  Cyclic GFR-binding peptide
  MOD_RES (14)..(15): Xaa is C or S
YYLITLPELDQSVXXPSAS

SEQ ID NO: 7632 - protein, 29 aa, Artificial Sequence
  Cyclic GFR-binding peptide
  MOD_RES (23)..(23): Xaa is C or S
HQGQHPKIRYYVMPLPEEETPVXELGEDN

SEQ ID NO: 7633 - protein, 15 aa, Artificial Sequence
  Cyclic GFR-binding peptide
VVKENEDIKRMQVPR

SEQ ID NO: 7634 - protein, 18 aa, Artificial Sequence
  Cyclic GFR-binding peptide
  MOD_RES (14)..(15): Xaa is C or S
YYLMTLPELETPVXXAKP

SEQ ID NO: 7635 - protein, 20 aa, Artificial Sequence
  Cyclic GFR-binding peptide
FIPKKRVIEVKAVKVSRLQV

SEQ ID NO: 7636 - protein, 19 aa, Artificial Sequence
  Cyclic GFR-binding peptide
VKPTRGVVKAIKVSRLDQP

SEQ ID NO: 7637 - protein, 18 aa, Artificial Sequence
  Cyclic GFR-binding peptide
  MOD_RES (14)..(15): Xaa is C or S
YYLITLPELDQPVXXPSA

SEQ ID NO: 7638 - protein, 19 aa, Artificial Sequence
  Cyclic GFR-binding peptide
IVNSSDDIKRVQVPRLKTP

SEQ ID NO: 7639 - protein, 29 aa, Artificial Sequence
  Cyclic GFR-binding peptide
  MOD_RES (23)..(23): Xaa is C or S
HQGQHPKIRIKRMQVPREETPVXELGEDN

SEQ ID NO: 7640 - protein, 14 aa, Artificial Sequence
  Cyclic GFR-binding peptide
  MOD_RES (14)..(14): Xaa is C or S
VKAVKVSRLKTPAX

SEQ ID NO: 7641 - protein, 18 aa, Artificial Sequence
  Cyclic GFR-binding peptide
  MOD_RES (14)..(15): Xaa is C or S
MIQITINSLDQPVXXPSA

SEQ ID NO: 7642 - protein, 18 aa, Artificial Sequence
  Cyclic GFR-binding peptide
  MOD_RES (14)..(15): Xaa is C or S
IKRVQVPRLKTPAXXPKP

SEQ ID NO: 7643 - protein, 19 aa, Artificial Sequence
  Cyclic GFR-binding peptide
IVNSSDDIKRVQVPRLQTP

SEQ ID NO: 7644 - protein, 27 aa, Artificial Sequence
  Cyclic GFR-binding peptide
  MOD_RES (21)..(21): Xaa is C or S
IVNSSDDIKRVQVPRLKTPAXTPKTVH

SEQ ID NO: 7645 - protein, 29 aa, Artificial Sequence
  Cyclic GFR-binding peptide
  MOD_RES (25)..(25): Xaa is C or S
FIPKKRVIEIKRVQVPRLQVQTPRXQVNR

SEQ ID NO: 7646 - protein, 19 aa, Artificial Sequence
  Cyclic GFR-binding peptide
VKPTRGVIKRIQVPRLDQP

SEQ ID NO: 7647 - protein, 16 aa, Artificial Sequence
  Cyclic GFR-binding peptide
  MOD_RES (14)..(14): Xaa is C or S
MIQVTINSLKTPAXTP

SEQ ID NO: 7648 - protein, 16 aa, Artificial Sequence
  Cyclic GFR-binding peptide
VVKENEDYYLMTLPEL

SEQ ID NO: 7649 - protein, 16 aa, Artificial Sequence
  Cyclic GFR-binding peptide
VVKDYEDMIQMTINSL

SEQ ID NO: 7650 - protein, 18 aa, Artificial Sequence
  Cyclic GFR-binding peptide
HQGQHPKIRYYLMTLPEE

SEQ ID NO: 7651 - protein, 15 aa, Artificial Sequence
  Cyclic GFR-binding peptide
IKPTKGIYYLITLPE

SEQ ID NO: 7652 - protein, 20 aa, Artificial Sequence
  Cyclic GFR-binding peptide
  MOD_RES (14)..(15): Xaa is C or S
YYVIPLPELDQPVXXPSASA

SEQ ID NO: 7653 - protein, 19 aa, Artificial Sequence
  Cyclic GFR-binding peptide
  MOD_RES (14)..(15): Xaa is C or S
MIQMTINSLETPVXXAKPI

SEQ ID NO: 7654 - protein, 17 aa, Artificial Sequence
  Cyclic GFR-binding peptide
  MOD_RES (14)..(15): Xaa is C or S
YYVVPLPELKTPAXXPK

SEQ ID NO: 7655 - protein, 27 aa, Artificial Sequence
  Cyclic GFR-binding peptide
  MOD_RES (21)..(21): Xaa is C or S
IVNSSDDMIQVTINSLKTPAXTPKTVH

SEQ ID NO: 7656 - protein, 13 aa, Artificial Sequence
  Cyclic GFR-binding peptide
IKRIQVPRLAQPV

SEQ ID NO: 7657 - protein, 16 aa, Artificial Sequence
  Cyclic GFR-binding peptide
VVKDYEDVKAMKVSRL

SEQ ID NO: 7658 - protein, 18 aa, Artificial Sequence
  Cyclic GFR-binding peptide
HQGQHPKIRVKAMKVSRE

SEQ ID NO: 7659 - protein, 17 aa, Artificial Sequence
  Cyclic GFR-binding peptide
VVKDYEDVKAMKVSRLE

SEQ ID NO: 7660 - protein, 27 aa, Artificial Sequence
  Cyclic GFR-binding peptide
  MOD_RES (21)..(22): Xaa is C or S
VVKDYEDIKRMQVPRLETPVXXAKPIS

SEQ ID NO: 7661 - protein, 19 aa, Artificial Sequence
  Cyclic GFR-binding peptide
  MOD_RES (14)..(15): Xaa is C or S
MIQVTINSLKTPAXXPKPV

SEQ ID NO: 7662 - protein, 16 aa, Artificial Sequence
  Cyclic GFR-binding peptide
  MOD_RES (14)..(15): Xaa is C or S
MIQITINSLAQPVXXP

SEQ ID NO: 7663 - protein, 13 aa, Artificial Sequence
  Cyclic GFR-binding peptide
YYLITLPELDQSV

SEQ ID NO: 7664 - protein, 18 aa, Artificial Sequence
  Cyclic GFR-binding peptide
  MOD_RES (14)..(15): Xaa is C or S
VKAVKVSRLQTPAXXPKP

SEQ ID NO: 7665 - protein, 19 aa, Artificial Sequence
  Cyclic GFR-binding peptide
IVNSSDDMIQVTINSLKTP

SEQ ID NO: 7666 - protein, 27 aa, Artificial Sequence
  Cyclic GFR-binding peptide
  MOD_RES (21)..(22): Xaa is C or S
IVNSSDDIKRVQVPRLQTPAXXPKPVT

SEQ ID NO: 7667 - protein, 16 aa, Artificial Sequence
  Cyclic GFR-binding peptide
  MOD_RES (14)..(15): Xaa is C or S
MIQITINSLDQPVXXP

SEQ ID NO: 7668 - protein, 14 aa, Artificial Sequence
  Cyclic GFR-binding peptide
YYVVPLPEHHVRSP

SEQ ID NO: 7669 - protein, 17 aa, Artificial Sequence
  Cyclic GFR-binding peptide
VVKDYEDIKRMQVPRLE

SEQ ID NO: 7670 - protein, 17 aa, Artificial Sequence
  Cyclic GFR-binding peptide
  MOD_RES (14)..(14): Xaa is C or S
MIQVTINSLKTPAXTPK

SEQ ID NO: 7671 - protein, 19 aa, Artificial Sequence
  Cyclic GFR-binding peptide
IVNSSDDMIQVTINSLQTP

SEQ ID NO: 7672 - protein, 20 aa, Artificial Sequence
  Cyclic GFR-binding peptide
  MOD_RES (14)..(15): Xaa is C or S
MIQITINSLDQSVXXPSASA

SEQ ID NO: 7673 - protein, 27 aa, Artificial Sequence
  Cyclic GFR-binding peptide
  MOD_RES (21)..(22): Xaa is C or S
VVKDYEDVKAMKVSRLETPVXXAKPIS

SEQ ID NO: 7674 - protein, 20 aa, Artificial Sequence
  Cyclic GFR-binding peptide
  MOD_RES (14)..(14): Xaa is C or S
IKRVQVPRLKTPAXTPKTVH

SEQ ID NO: 7675 - protein, 29 aa, Artificial Sequence
  Cyclic GFR-binding peptide
  MOD_RES (25)..(25): Xaa is C or S
FIPKKRVIEYYLVTLPELQVQTPRXQVNR

SEQ ID NO: 7676 - protein, 18 aa, Artificial Sequence
  Cyclic GFR-binding peptide
  MOD_RES (14)..(14): Xaa is C or S
VKAMKVSREETPVXELGE

SEQ ID NO: 7677 - protein, 16 aa, Artificial Sequence
  Cyclic GFR-binding peptide
  MOD_RES (14)..(15): Xaa is C or S
IKRVQVPRLQTPAXXP

SEQ ID NO: 7678 - protein, 16 aa, Artificial Sequence
  Cyclic GFR-binding peptide
VVKDYEDIKRMQVPRL

SEQ ID NO: 7679 - protein, 15 aa, Artificial Sequence
  Cyclic GFR-binding peptide
  MOD_RES (14)..(15): Xaa is C or S
MIQITINSLDQSVXX

SEQ ID NO: 7680 - protein, 15 aa, Artificial Sequence
  Cyclic GFR-binding peptide
VKPTRGVMIQITINS

SEQ ID NO: 7681 - protein, 16 aa, Artificial Sequence
  Cyclic GFR-binding peptide
  MOD_RES (14)..(14): Xaa is C or S
YYVMPLPEEETPVXEL

SEQ ID NO: 7682 - protein, 16 aa, Artificial Sequence
  Cyclic GFR-binding peptide
VKPKRGVVKAIKVSRL

SEQ ID NO: 7683 - protein, 15 aa, Artificial Sequence
  Cyclic GFR-binding peptide
VVKENEDMIQMTINS

SEQ ID NO: 7684 - protein, 17 aa, Artificial Sequence
  Cyclic GFR-binding peptide
  MOD_RES (16)..(16): Xaa is C or S
YYVVPLPELQVQTPRXQ

SEQ ID NO: 7685 - protein, 17 aa, Artificial Sequence
  Cyclic GFR-binding peptide
IKPTKGIMIQITINSLD

SEQ ID NO: 7686 - protein, 15 aa, Artificial Sequence
  Cyclic GFR-binding peptide
  MOD_RES (14)..(14): Xaa is C or S
IKRVQVPRLKTPAXT

SEQ ID NO: 7687 - protein, 20 aa, Artificial Sequence
  Cyclic GFR-binding peptide
LKPKKRVYEYYVVPLPEHHV

SEQ ID NO: 7688 - protein, 19 aa, Artificial Sequence
  Cyclic GFR-binding peptide
FIPKKRVIEVKAVKVSRLQ

SEQ ID NO: 7689 - protein, 14 aa, Artificial Sequence
  Cyclic GFR-binding peptide
  MOD_RES (14)..(14): Xaa is C or S
VKAIKVSRLDQPVX

SEQ ID NO: 7690 - protein, 18 aa, Artificial Sequence
  Cyclic GFR-binding peptide
FIPKKRVIEYYVVPLPEL

SEQ ID NO: 7691 - protein, 27 aa, Artificial Sequence
  Cyclic GFR-binding peptide
  MOD_RES (21)..(22): Xaa is C or S
IVNSSDDVKAVKVSRLQTPAXXPKPVT

SEQ ID NO: 7692 - protein, 17 aa, Artificial Sequence
  Cyclic GFR-binding peptide
FIPKKRVIEYYVVPLPE

SEQ ID NO: 7693 - protein, 29 aa, Artificial Sequence
  Cyclic GFR-binding peptide
  MOD_RES (25)..(25): Xaa is C or S
LKPKKRVYEYYVVPLPEHHVRSPQXKVSS

SEQ ID NO: 7694 - protein, 13 aa, Artificial Sequence
  Cyclic GFR-binding peptide
MIQITINSLAQPV

SEQ ID NO: 7695 - protein, 17 aa, Artificial Sequence
  Cyclic GFR-binding peptide
  MOD_RES (14)..(15): Xaa is C or S
YYVMPLPELETPVXXAK

SEQ ID NO: 7696 - protein, 20 aa, Artificial Sequence
  Cyclic GFR-binding peptide
HQGQHPKIRMIQMTINSEET

SEQ ID NO: 7697 - protein, 18 aa, Artificial Sequence
  Cyclic GFR-binding peptide
HQGQHPKIRYYVMPLPEE

SEQ ID NO: 7698 - protein, 18 aa, Artificial Sequence
  Cyclic GFR-binding peptide
  MOD_RES (16)..(16): Xaa is C or S
MIQVTINSLQVQTPRXQV

SEQ ID NO: 7699 - protein, 19 aa, Artificial Sequence
  Cyclic GFR-binding peptide
LKPKKRVYEMIQVTINSHH

SEQ ID NO: 7700 - protein, 14 aa, Artificial Sequence
  Cyclic GFR-binding peptide
IKRVQVPRHHVRSP

SEQ ID NO: 7701 - protein, 21 aa, Artificial Sequence
  Cyclic GFR-binding peptide
FIPKKRVIEYYVVPLPELQVQ

SEQ ID NO: 7702 - protein, 14 aa, Artificial Sequence
  Cyclic GFR-binding peptide
  MOD_RES (14)..(14): Xaa is C or S
IKRVQVPRLQTPAX

SEQ ID NO: 7703 - protein, 15 aa, Artificial Sequence
  Cyclic GFR-binding peptide
  MOD_RES (14)..(15): Xaa is C or S
YYVVPLPELQTPAXX

SEQ ID NO: 7704 - protein, 20 aa, Artificial Sequence
  Cyclic GFR-binding peptide
LKPKKRVYEYYLVTLPEHHV

SEQ ID NO: 7705 - protein, 17 aa, Artificial Sequence
  Cyclic GFR-binding peptide
HQGQHPKIRIKRMQVPR

SEQ ID NO: 7706 - protein, 27 aa, Artificial Sequence
  Cyclic GFR-binding peptide
  MOD_RES (21)..(22): Xaa is C or S
IVNSSDDYYVVPLPELKTPAXXPKPVY

SEQ ID NO: 7707 - protein, 19 aa, Artificial Sequence
  Cyclic GFR-binding peptide
  MOD_RES (14)..(15): Xaa is C or S
IKRIQVPRLAQPVXXPAAS

SEQ ID NO: 7708 - protein, 15 aa, Artificial Sequence
  Cyclic GFR-binding peptide
VVKDYEDIKRMQVPR

SEQ ID NO: 7709 - protein, 17 aa, Artificial Sequence
  Cyclic GFR-binding peptide
  MOD_RES (14)..(15): Xaa is C or S
YYLVTLPELKTPAXXPK

SEQ ID NO: 7710 - protein, 27 aa, Artificial Sequence
  Cyclic GFR-binding peptide
  MOD_RES (21)..(22): Xaa is C or S
VKPKRGVYYLITLPELAQPVXXPAASA

SEQ ID NO: 7711 - protein, 19 aa, Artificial Sequence
  Cyclic GFR-binding peptide
HQGQHPKIRMIQMTINSEE

SEQ ID NO: 7712 - protein, 16 aa, Artificial Sequence
  Cyclic GFR-binding peptide
IKPTKGIVKAIKVSRL

SEQ ID NO: 7713 - protein, 15 aa, Artificial Sequence
  Cyclic GFR-binding peptide
  MOD_RES (14)..(15): Xaa is C or S
YYLITLPELDQSVXX

SEQ ID NO: 7714 - protein, 20 aa, Artificial Sequence
  Cyclic GFR-binding peptide
  MOD_RES (14)..(15): Xaa is C or S
YYLITLPELAQPVXXPAASA

SEQ ID NO: 7715 - protein, 18 aa, Artificial Sequence
  Cyclic GFR-binding peptide
VVKENEDIKRMQVPRLET

SEQ ID NO: 7716 - protein, 18 aa, Artificial Sequence
  Cyclic GFR-binding peptide
  MOD_RES (14)..(14): Xaa is C or S
MIQVTINSLKTPAXTPKT

SEQ ID NO: 7717 - protein, 15 aa, Artificial Sequence
  Cyclic GFR-binding peptide
MIQVTINSLQVQTPR

SEQ ID NO: 7718 - protein, 14 aa, Artificial Sequence
  Cyclic GFR-binding peptide
  MOD_RES (14)..(14): Xaa is C or S
YYVIPLPELDQPVX

SEQ ID NO: 7719 - protein, 19 aa, Artificial Sequence
  Cyclic GFR-binding peptide
FIPKKRVIEIKRVQVPRLQ

SEQ ID NO: 7720 - protein, 20 aa, Artificial Sequence
  Cyclic GFR-binding peptide
  MOD_RES (16)..(16): Xaa is C or S
MIQVTINSLQVQTPRXQVNR

SEQ ID NO: 7721 - protein, 15 aa, Artificial Sequence
  Cyclic GFR-binding peptide
  MOD_RES (14)..(15): Xaa is C or S
MIQITINSLDQPVXX

SEQ ID NO: 7722 - protein, 27 aa, Artificial Sequence
  Cyclic GFR-binding peptide
  MOD_RES (21)..(22): Xaa is C or S
IVNSSDDYYVVPLPELQTPAXXPKPVT

SEQ ID NO: 7723 - protein, 13 aa, Artificial Sequence
  Cyclic GFR-binding peptide
IKRVQVPRLKTPA

SEQ ID NO: 7724 - protein, 17 aa, Artificial Sequence
  Cyclic GFR-binding peptide
VKPTRGVVKAIKVSRLD

SEQ ID NO: 7725 - protein, 18 aa, Artificial Sequence
  Cyclic GFR-binding peptide
  MOD_RES (14)..(15): Xaa is C or S
YYLVTLPELQTPAXXPKP

SEQ ID NO: 7726 - protein, 17 aa, Artificial Sequence
  Cyclic GFR-binding peptide
LKPKKRVYEYYVVPLPE

SEQ ID NO: 7727 - protein, 20 aa, Artificial Sequence
  Cyclic GFR-binding peptide
  MOD_RES (14)..(15): Xaa is C or S
YYVVPLPELQTPAXXPKPVT

SEQ ID NO: 7728 - protein, 19 aa, Artificial Sequence
  Cyclic GFR-binding peptide
  MOD_RES (16)..(16): Xaa is C or S
IKRVQVPRHHVRSPQXKVS

SEQ ID NO: 7729 - protein, 19 aa, Artificial Sequence
  Cyclic GFR-binding peptide
VKPKRGVYYVIPLPELAQP

SEQ ID NO: 7730 - protein, 17 aa, Artificial Sequence
  Cyclic GFR-binding peptide
LKPKKRVYEVKAVKVSR

SEQ ID NO: 7731 - protein, 13 aa, Artificial Sequence
  Cyclic GFR-binding peptide
MIQVTINSLQTPA

SEQ ID NO: 7732 - protein, 16 aa, Artificial Sequence
  Cyclic GFR-binding peptide
  MOD_RES (14)..(15): Xaa is C or S
YYVVPLPELQTPAXXP

SEQ ID NO: 7733 - protein, 18 aa, Artificial Sequence
  Cyclic GFR-binding peptide
FIPKKRVIEYYLVTLPEL

SEQ ID NO: 7734 - protein, 13 aa, Artificial Sequence
  Cyclic GFR-binding peptide
YYLVTLPELQVQT

SEQ ID NO: 7735 - protein, 15 aa, Artificial Sequence
  Cyclic GFR-binding peptide
  MOD_RES (14)..(15): Xaa is C or S
VKAMKVSRLETPVXX

SEQ ID NO: 7736 - protein, 21 aa, Artificial Sequence
  Cyclic GFR-binding peptide
LKPKKRVYEMIQVTINSHHVR

SEQ ID NO: 7737 - protein, 20 aa, Artificial Sequence
  Cyclic GFR-binding peptide
HQGQHPKIRVKAMKVSREET

SEQ ID NO: 7738 - protein, 19 aa, Artificial Sequence
  Cyclic GFR-binding peptide
LKPKKRVYEVKAVKVSRHH

SEQ ID NO: 7739 - protein, 20 aa, Artificial Sequence
  Cyclic GFR-binding peptide
  MOD_RES (14)..(15): Xaa is C or S
IKRMQVPRLETPVXXAKPIS

SEQ ID NO: 7740 - protein, 19 aa, Artificial Sequence
  Cyclic GFR-binding peptide
LKPKKRVYEYYVVPLPEHH

SEQ ID NO: 7741 - protein, 15 aa, Artificial Sequence
  Cyclic GFR-binding peptide
VKPTRGVVKAIKVSR

SEQ ID NO: 7742 - protein, 17 aa, Artificial Sequence
  Cyclic GFR-binding peptide
  MOD_RES (14)..(14): Xaa is C or S
IKRVQVPRLKTPAXTPK

SEQ ID NO: 7743 - protein, 19 aa, Artificial Sequence
  Cyclic GFR-binding peptide
VVKENEDYYVMPLPELETP

SEQ ID NO: 7744 - protein, 17 aa, Artificial Sequence
  Cyclic GFR-binding peptide
LKPKKRVYEMIQVTINS

SEQ ID NO: 7745 - protein, 16 aa, Artificial Sequence
  Cyclic GFR-binding peptide
  MOD_RES (14)..(15): Xaa is C or S
IKRMQVPRLETPVXXA

SEQ ID NO: 7746 - protein, 17 aa, Artificial Sequence
  Cyclic GFR-binding peptide
  MOD_RES (16)..(16): Xaa is C or S
MIQVTINSHHVRSPQXK

SEQ ID NO: 7747 - protein, 17 aa, Artificial Sequence
  Cyclic GFR-binding peptide
VKPKRGVYYLITLPELA

SEQ ID NO: 7748 - protein, 15 aa, Artificial Sequence
  Cyclic GFR-binding peptide
IVNSSDDVKAVKVSR

SEQ ID NO: 7749 - protein, 17 aa, Artificial Sequence
  Cyclic GFR-binding peptide
FIPKKRVIEVKAVKVSR

SEQ ID NO: 7750 - protein, 19 aa, Artificial Sequence
  Cyclic GFR-binding peptide
IVNSSDDYYLVTLPELKTP

SEQ ID NO: 7751 - protein, 18 aa, Artificial Sequence
  Cyclic GFR-binding peptide
  MOD_RES (14)..(15): Xaa is C or S
YYLITLPELAQPVXXPAA

SEQ ID NO: 7752 - protein, 27 aa, Artificial Sequence
  Cyclic GFR-binding peptide
  MOD_RES (21)..(22): Xaa is C or S
IKPTKGIYYLITLPELDQSVXXPSASA

SEQ ID NO: 7753 - protein, 14 aa, Artificial Sequence
  Cyclic GFR-binding peptide
YYLVTLPELQVQTP

SEQ ID NO: 7754 - protein, 15 aa, Artificial Sequence
  Cyclic GFR-binding peptide
  MOD_RES (14)..(15): Xaa is C or S
IKRVQVPRLKTPAXX

SEQ ID NO: 7755 - protein, 17 aa, Artificial Sequence
  Cyclic GFR-binding peptide
VKPKRGVMIQITINSLA

SEQ ID NO: 7756 - protein, 19 aa, Artificial Sequence
  Cyclic GFR-binding peptide
IVNSSDDYYLVTLPELQTP

SEQ ID NO: 7757 - protein, 21 aa, Artificial Sequence
  Cyclic GFR-binding peptide
LKPKKRVYEVKAVKVSRHHVR

SEQ ID NO: 7758 - protein, 21 aa, Artificial Sequence
  Cyclic GFR-binding peptide
LKPKKRVYEYYLVTLPEHHVR

SEQ ID NO: 7759 - protein, 19 aa, Artificial Sequence
  Cyclic GFR-binding peptide
  MOD_RES (14)..(15): Xaa is C or S
YYVVPLPELQTPAXXPKPV

SEQ ID NO: 7760 - protein, 19 aa, Artificial Sequence
  Cyclic GFR-binding peptide
  MOD_RES (16)..(16): Xaa is C or S
YYVVPLPELQVQTPRXQVN

SEQ ID NO: 7761 - protein, 13 aa, Artificial Sequence
  Cyclic GFR-binding peptide
YYVVPLPELQVQT

SEQ ID NO: 7762 - protein, 15 aa, Artificial Sequence
  Cyclic GFR-binding peptide
  MOD_RES (14)..(15): Xaa is C or S
YYLVTLPELQTPAXX

SEQ ID NO: 7763 - protein, 19 aa, Artificial Sequence
  Cyclic GFR-binding peptide
IKPTKGIIKRIQVPRLDQS

SEQ ID NO: 7764 - protein, 18 aa, Artificial Sequence
  Cyclic GFR-binding peptide
VKPKRGVIKRIQVPRLAQ

SEQ ID NO: 7765 - protein, 16 aa, Artificial Sequence
  Cyclic GFR-binding peptide
IKPTKGIMIQITINSL

SEQ ID NO: 7766 - protein, 17 aa, Artificial Sequence
  Cyclic GFR-binding peptide
  MOD_RES (14)..(15): Xaa is C or S
MIQVTINSLQTPAXXPK

SEQ ID NO: 7767 - protein, 19 aa, Artificial Sequence
  Cyclic GFR-binding peptide
  MOD_RES (14)..(14): Xaa is C or S
MIQVTINSLKTPAXTPKTV

SEQ ID NO: 7768 - protein, 27 aa, Artificial Sequence
  Cyclic GFR-binding peptide
  MOD_RES (21)..(22): Xaa is C or S
VKPTRGVYYLITLPELDQPVXXPSASA

SEQ ID NO: 7769 - protein, 19 aa, Artificial Sequence
  Cyclic GFR-binding peptide
  MOD_RES (14)..(15): Xaa is C or S
VKAVKVSRLKTPAXXPKPV

SEQ ID NO: 7770 - protein, 27 aa, Artificial Sequence
  Cyclic GFR-binding peptide
  MOD_RES (21)..(22): Xaa is C or S
VVKENEDYYVMPLPELETPVXXAKPIK

SEQ ID NO: 7771 - protein, 19 aa, Artificial Sequence
  Cyclic GFR-binding peptide
VKPTRGVMIQITINSLDQP

SEQ ID NO: 7772 - protein, 18 aa, Artificial Sequence
  Cyclic GFR-binding peptide
HQGQHPKIRMIQMTINSE

SEQ ID NO: 7773 - protein, 20 aa, Artificial Sequence
  Cyclic GFR-binding peptide
  MOD_RES (14)..(15): Xaa is C or S
VKAIKVSRLDQSVXXPSASA

SEQ ID NO: 7774 - protein, 18 aa, Artificial Sequence
  Cyclic GFR-binding peptide
IKPTKGIYYVIPLPELDQ

SEQ ID NO: 7775 - protein, 14 aa, Artificial Sequence
  Cyclic GFR-binding peptide
  MOD_RES (14)..(14): Xaa is C or S
IKRIQVPRLAQPVX

SEQ ID NO: 7776 - protein, 14 aa, Artificial Sequence
  Cyclic GFR-binding peptide
  MOD_RES (14)..(14): Xaa is C or S
YYLITLPELDQPVX

SEQ ID NO: 7777 - protein, 18 aa, Artificial Sequence
  Cyclic GFR-binding peptide
  MOD_RES (14)..(15): Xaa is C or S
IKRMQVPRLETPVXXAKP

SEQ ID NO: 7778 - protein, 20 aa, Artificial Sequence
  Cyclic GFR-binding peptide
HQGQHPKIRYYLMTLPEEET

SEQ ID NO: 7779 - protein, 20 aa, Artificial Sequence
  Cyclic GFR-binding peptide
  MOD_RES (14)..(15): Xaa is C or S
MIQMTINSLETPVXXAKPIK

SEQ ID NO: 7780 - protein, 15 aa, Artificial Sequence
  Cyclic GFR-binding peptide
VKPKRGVYYLITLPE

SEQ ID NO: 7781 - protein, 18 aa, Artificial Sequence
  Cyclic GFR-binding peptide
  MOD_RES (14)..(15): Xaa is C or S
YYVIPLPELDQPVXXPSA

SEQ ID NO: 7782 - protein, 21 aa, Artificial Sequence
  Cyclic GFR-binding peptide
FIPKKRVIEVKAVKVSRLQVQ

SEQ ID NO: 7783 - protein, 20 aa, Artificial Sequence
  Cyclic GFR-binding peptide
LKPKKRVYEMIQVTINSHHV

SEQ ID NO: 7784 - protein, 18 aa, Artificial Sequence
  Cyclic GFR-binding peptide
  MOD_RES (14)..(15): Xaa is C or S
IKRIQVPRLDQSVXXPSA

SEQ ID NO: 7785 - protein, 18 aa, Artificial Sequence
  Cyclic GFR-binding peptide
FIPKKRVIEMIQVTINSL

SEQ ID NO: 7786 - protein, 15 aa, Artificial Sequence
  Cyclic GFR-binding peptide
  MOD_RES (14)..(15): Xaa is C or S
MIQVTINSLKTPAXX

SEQ ID NO: 7787 - protein, 20 aa, Artificial Sequence
  Cyclic GFR-binding peptide
  MOD_RES (14)..(15): Xaa is C or S
IKRIQVPRLDQSVXXPSASA

SEQ ID NO: 7788 - protein, 13 aa, Artificial Sequence
  Cyclic GFR-binding peptide
MIQITINSLDQPV

SEQ ID NO: 7789 - protein, 21 aa, Artificial Sequence
  Cyclic GFR-binding peptide
HQGQHPKIRMIQMTINSEETP

SEQ ID NO: 7790 - protein, 20 aa, Artificial Sequence
  Cyclic GFR-binding peptide
  MOD_RES (16)..(16): Xaa is C or S
YYVVPLPELQVQTPRXQVNR

SEQ ID NO: 7791 - protein, 19 aa, Artificial Sequence
  Cyclic GFR-binding peptide
  MOD_RES (14)..(15): Xaa is C or S
IKRVQVPRLKTPAXXPKPV

SEQ ID NO: 7792 - protein, 17 aa, Artificial Sequence
  Cyclic GFR-binding peptide
VKPKRGVVKAIKVSRLA

SEQ ID NO: 7793 - protein, 15 aa, Artificial Sequence
  Cyclic GFR-binding peptide
IVNSSDDMIQVTINS

SEQ ID NO: 7794 - protein, 17 aa, Artificial Sequence
  Cyclic GFR-binding peptide
  MOD_RES (14)..(14): Xaa is C or S
VKAVKVSRLKTPAXTPK

SEQ ID NO: 7795 - protein, 20 aa, Artificial Sequence
  Cyclic GFR-binding peptide
  MOD_RES (14)..(15): Xaa is C or S
VKAVKVSRLQTPAXXPKPVT

SEQ ID NO: 7796 - protein, 19 aa, Artificial Sequence
  Cyclic GFR-binding peptide
VKPTRGVYYVIPLPELDQP

SEQ ID NO: 7797 - protein, 18 aa, Artificial Sequence
  Cyclic GFR-binding peptide
  MOD_RES (14)..(15): Xaa is C or S
VKAIKVSRLDQPVXXPSA

SEQ ID NO: 7798 - protein, 19 aa, Artificial Sequence
  Cyclic GFR-binding peptide
  MOD_RES (14)..(15): Xaa is C or S
YYLITLPELDQPVXXPSAS

SEQ ID NO: 7799 - protein, 20 aa, Artificial Sequence
  Cyclic GFR-binding peptide
  MOD_RES (14)..(15): Xaa is C or S
IKRMQVPRLETPVXXAKPIK

SEQ ID NO: 7800 - protein, 18 aa, Artificial Sequence
  Cyclic GFR-binding peptide
  MOD_RES (14)..(15): Xaa is C or S
YYLITLPELDQSVXXPSA

SEQ ID NO: 7801 - protein, 16 aa, Artificial Sequence
  Cyclic GFR-binding peptide
  MOD_RES (14)..(14): Xaa is C or S
YYLMTLPEEETPVXEL

SEQ ID NO: 7802 - protein, 18 aa, Artificial Sequence
  Cyclic GFR-binding peptide
  MOD_RES (14)..(15): Xaa is C or S
MIQITINSLDQSVXXPSA

SEQ ID NO: 7803 - protein, 18 aa, Artificial Sequence
  Cyclic GFR-binding peptide
  MOD_RES (14)..(14): Xaa is C or S
YYVVPLPELKTPAXTPKT

SEQ ID NO: 7804 - protein, 14 aa, Artificial Sequence
  Cyclic GFR-binding peptide
  MOD_RES (14)..(14): Xaa is C or S
VKAVKVSRLQTPAX

SEQ ID NO: 7805 - protein, 15 aa, Artificial Sequence
  Cyclic GFR-binding peptide
  MOD_RES (14)..(15): Xaa is C or S
MIQITINSLAQPVXX

SEQ ID NO: 7806 - protein, 16 aa, Artificial Sequence
  Cyclic GFR-binding peptide
VVKDYEDYYVMPLPEL

SEQ ID NO: 7807 - protein, 14 aa, Artificial Sequence
  Cyclic GFR-binding peptide
  MOD_RES (14)..(14): Xaa is C or S
IKRIQVPRLDQPVX

SEQ ID NO: 7808 - protein, 15 aa, Artificial Sequence
  Cyclic GFR-binding peptide
  MOD_RES (14)..(15): Xaa is C or S
YYLITLPELAQPVXX

SEQ ID NO: 7809 - protein, 18 aa, Artificial Sequence
  Cyclic GFR-binding peptide
  MOD_RES (14)..(15): Xaa is C or S
MIQVTINSLKTPAXXPKP

SEQ ID NO: 7810 - protein, 15 aa, Artificial Sequence
  Cyclic GFR-binding peptide
YYVVPLPELQVQTPR

SEQ ID NO: 7811 - protein, 15 aa, Artificial Sequence
  Cyclic GFR-binding peptide
IVNSSDDYYVVPLPE

SEQ ID NO: 7812 - protein, 13 aa, Artificial Sequence
  Cyclic GFR-binding peptide
YYLVTLPELKTPA

SEQ ID NO: 7813 - protein, 18 aa, Artificial Sequence
  Cyclic GFR-binding peptide
  MOD_RES (14)..(15): Xaa is C or S
VKAMKVSRLETPVXXAKP

SEQ ID NO: 7814 - protein, 20 aa, Artificial Sequence
  Cyclic GFR-binding peptide
  MOD_RES (14)..(15): Xaa is C or S
YYVMPLPELETPVXXAKPIK

SEQ ID NO: 7815 - protein, 20 aa, Artificial Sequence
  Cyclic GFR-binding peptide
FIPKKRVIEIKRVQVPRLQV

SEQ ID NO: 7816 - protein, 14 aa, Artificial Sequence
  Cyclic GFR-binding peptide
  MOD_RES (14)..(14): Xaa is C or S
YYLITLPELAQPVX

SEQ ID NO: 7817 - protein, 19 aa, Artificial Sequence
  Cyclic GFR-binding peptide
  MOD_RES (14)..(15): Xaa is C or S
VKAIKVSRLAQPVXXPAAS

SEQ ID NO: 7818 - protein, 16 aa, Artificial Sequence
  Cyclic GFR-binding peptide
  MOD_RES (16)..(16): Xaa is C or S
YYLVTLPELQVQTPRX

SEQ ID NO: 7819 - protein, 27 aa, Artificial Sequence
  Cyclic GFR-binding peptide
  MOD_RES (21)..(21): Xaa is C or S
IVNSSDDYYLVTLPELKTPAXTPKTVH

SEQ ID NO: 7820 - protein, 14 aa, Artificial Sequence
  Cyclic GFR-binding peptide
  MOD_RES (14)..(14): Xaa is C or S
MIQITINSLDQSVX

SEQ ID NO: 7821 - protein, 17 aa, Artificial Sequence
  Cyclic GFR-binding peptide
  MOD_RES (14)..(15): Xaa is C or S
IKRMQVPRLETPVXXAK

SEQ ID NO: 7822 - protein, 15 aa, Artificial Sequence
  Cyclic GFR-binding peptide
  MOD_RES (14)..(14): Xaa is C or S
YYVMPLPEEETPVXE

SEQ ID NO: 7823 - protein, 21 aa, Artificial Sequence
  Cyclic GFR-binding peptide
HQGQHPKIRYYVMPLPEEETP

SEQ ID NO: 7824 - protein, 17 aa, Artificial Sequence
  Cyclic GFR-binding peptide
IKPTKGIYYLITLPELD

SEQ ID NO: 7825 - protein, 18 aa, Artificial Sequence
  Cyclic GFR-binding peptide
  MOD_RES (14)..(15): Xaa is C or S
IKRVQVPRLQTPAXXPKP

SEQ ID NO: 7826 - protein, 17 aa, Artificial Sequence
  Cyclic GFR-binding peptide
  MOD_RES (16)..(16): Xaa is C or S
YYLVTLPEHHVRSPQXK

SEQ ID NO: 7827 - protein, 17 aa, Artificial Sequence
  Cyclic GFR-binding peptide
VVKENEDVKAMKVSRLE

SEQ ID NO: 7828 - protein, 18 aa, Artificial Sequence
  Cyclic GFR-binding peptide
VKPTRGVIKRIQVPRLDQ

SEQ ID NO: 7829 - protein, 17 aa, Artificial Sequence
  Cyclic GFR-binding peptide
FIPKKRVIEYYLVTLPE

SEQ ID NO: 7830 - protein, 15 aa, Artificial Sequence
  Cyclic GFR-binding peptide
  MOD_RES (14)..(15): Xaa is C or S
IKRVQVPRLQTPAXX

SEQ ID NO: 7831 - protein, 21 aa, Artificial Sequence
  Cyclic GFR-binding peptide
FIPKKRVIEYYLVTLPELQVQ

SEQ ID NO: 7832 - protein, 19 aa, Artificial Sequence
  Cyclic GFR-binding peptide
VKPKRGVVKAIKVSRLAQP

SEQ ID NO: 7833 - protein, 16 aa, Artificial Sequence
  Cyclic GFR-binding peptide
IKPTKGIYYVIPLPEL

SEQ ID NO: 7834 - protein, 17 aa, Artificial Sequence
  Cyclic GFR-binding peptide
  MOD_RES (16)..(16): Xaa is C or S
VKAVKVSRLQVQTPRXQ

SEQ ID NO: 7835 - protein, 13 aa, Artificial Sequence
  Cyclic GFR-binding peptide
VKAMKVSRLETPV

SEQ ID NO: 7836 - protein, 27 aa, Artificial Sequence
  Cyclic GFR-binding peptide
  MOD_RES (21)..(22): Xaa is C or S
VVKENEDMIQMTINSLETPVXXAKPIK

SEQ ID NO: 7837 - protein, 17 aa, Artificial Sequence
  Cyclic GFR-binding peptide
  MOD_RES (14)..(15): Xaa is C or S
MIQVTINSLKTPAXXPK

SEQ ID NO: 7838 - protein, 15 aa, Artificial Sequence
  Cyclic GFR-binding peptide
  MOD_RES (14)..(15): Xaa is C or S
YYLVTLPELKTPAXX

SEQ ID NO: 7839 - protein, 16 aa, Artificial Sequence
  Cyclic GFR-binding peptide
VKPKRGVYYVIPLPEL

SEQ ID NO: 7840 - protein, 20 aa, Artificial Sequence
  Cyclic GFR-binding peptide
HQGQHPKIRYYVMPLPEEET

SEQ ID NO: 7841 - protein, 20 aa, Artificial Sequence
  Cyclic GFR-binding peptide
  MOD_RES (14)..(14): Xaa is C or S
YYLVTLPELKTPAXTPKTVH

SEQ ID NO: 7842 - protein, 18 aa, Artificial Sequence
  Cyclic GFR-binding peptide
IVNSSDDYYVVPLPELKT

SEQ ID NO: 7843 - protein, 14 aa, Artificial Sequence
  Cyclic GFR-binding peptide
  MOD_RES (14)..(14): Xaa is C or S
YYVVPLPELKTPAX

SEQ ID NO: 7844 - protein, 19 aa, Artificial Sequence
  Cyclic GFR-binding peptide
  MOD_RES (16)..(16): Xaa is C or S
YYLVTLPEHHVRSPQXKVS

SEQ ID NO: 7845 - protein, 13 aa, Artificial Sequence
  Cyclic GFR-binding peptide
YYLITLPELDQPV

SEQ ID NO: 7846 - protein, 18 aa, Artificial Sequence
  Cyclic GFR-binding peptide
VVKDYEDYYLMTLPELET

SEQ ID NO: 7847 - protein, 19 aa, Artificial Sequence
  Cyclic GFR-binding peptide
VVKENEDMIQMTINSLETP

SEQ ID NO: 7848 - protein, 20 aa, Artificial Sequence
  Cyclic GFR-binding peptide
  MOD_RES (14)..(15): Xaa is C or S
VKAMKVSRLETPVXXAKPIS

SEQ ID NO: 7849 - protein, 19 aa, Artificial Sequence
  Cyclic GFR-binding peptide
  MOD_RES (16)..(16): Xaa is C or S
MIQVTINSHHVRSPQXKVS

SEQ ID NO: 7850 - protein, 18 aa, Artificial Sequence
  Cyclic GFR-binding peptide
  MOD_RES (14)..(15): Xaa is C or S
YYVVPLPELQTPAXXPKP

SEQ ID NO: 7851 - protein, 15 aa, Artificial Sequence
  Cyclic GFR-binding peptide
IKPTKGIIKRIQVPR

SEQ ID NO: 7852 - protein, 27 aa, Artificial Sequence
  Cyclic GFR-binding peptide
  MOD_RES (21)..(22): Xaa is C or S
IVNSSDDVKAVKVSRLKTPAXXPKPVY

SEQ ID NO: 7853 - protein, 16 aa, Artificial Sequence
  Cyclic GFR-binding peptide
IVNSSDDYYLVTLPEL

SEQ ID NO: 7854 - protein, 16 aa, Artificial Sequence
  Cyclic GFR-binding peptide
  MOD_RES (14)..(15): Xaa is C or S
YYLVTLPELQTPAXXP

SEQ ID NO: 7855 - protein, 17 aa, Artificial Sequence
  Cyclic GFR-binding peptide
IVNSSDDYYLVTLPELK

SEQ ID NO: 7856 - protein, 19 aa, Artificial Sequence
  Cyclic GFR-binding peptide
HQGQHPKIRYYVMPLPEEE

SEQ ID NO: 7857 - protein, 18 aa, Artificial Sequence
  Cyclic GFR-binding peptide
IVNSSDDYYVVPLPELQT

SEQ ID NO: 7858 - protein, 17 aa, Artificial Sequence
  Cyclic GFR-binding peptide
VVKDYEDYYVMPLPELE

SEQ ID NO: 7859 - protein, 17 aa, Artificial Sequence
  Cyclic GFR-binding peptide
VKPTRGVMIQITINSLD

SEQ ID NO: 7860 - protein, 19 aa, Artificial Sequence
  Cyclic GFR-binding peptide
  MOD_RES (14)..(14): Xaa is C or S
YYVVPLPELKTPAXTPKTV

SEQ ID NO: 7861 - protein, 13 aa, Artificial Sequence
  Cyclic GFR-binding peptide
YYVVPLPELQTPA

SEQ ID NO: 7862 - protein, 19 aa, Artificial Sequence
  Cyclic GFR-binding peptide
  MOD_RES (16)..(16): Xaa is C or S
MIQVTINSLQVQTPRXQVN

SEQ ID NO: 7863 - protein, 16 aa, Artificial Sequence
  Cyclic GFR-binding peptide
  MOD_RES (14)..(15): Xaa is C or S
MIQVTINSLQTPAXXP

SEQ ID NO: 7864 - protein, 20 aa, Artificial Sequence
  Cyclic GFR-binding peptide
  MOD_RES (14)..(14): Xaa is C or S
MIQVTINSLKTPAXTPKTVH

SEQ ID NO: 7865 - protein, 16 aa, Artificial Sequence
  Cyclic GFR-binding peptide
  MOD_RES (14)..(15): Xaa is C or S
YYVMPLPELETPVXXA

SEQ ID NO: 7866 - protein, 18 aa, Artificial Sequence
  Cyclic GFR-binding peptide
LKPKKRVYEIKRVQVPRH

SEQ ID NO: 7867 - protein, 17 aa, Artificial Sequence
  Cyclic GFR-binding peptide
LKPKKRVYEYYLVTLPE

SEQ ID NO: 7868 - protein, 19 aa, Artificial Sequence
  Cyclic GFR-binding peptide
  MOD_RES (16)..(16): Xaa is C or S
YYLVTLPELQVQTPRXQVN

SEQ ID NO: 7869 - protein, 19 aa, Artificial Sequence
  Cyclic GFR-binding peptide
LKPKKRVYEYYLVTLPEHH

SEQ ID NO: 7870 - protein, 17 aa, Artificial Sequence
  Cyclic GFR-binding peptide
IVNSSDDYYLVTLPELQ

SEQ ID NO: 7871 - protein, 15 aa, Artificial Sequence
  Cyclic GFR-binding peptide
  MOD_RES (14)..(14): Xaa is C or S
IKRMQVPREETPVXE

SEQ ID NO: 7872 - protein, 27 aa, Artificial Sequence
  Cyclic GFR-binding peptide
  MOD_RES (21)..(22): Xaa is C or S
VVKDYEDYYLMTLPELETPVXXAKPIS

SEQ ID NO: 7873 - protein, 21 aa, Artificial Sequence
  Cyclic GFR-binding peptide
FIPKKRVIEMIQVTINSLQVQ

SEQ ID NO: 7874 - protein, 14 aa, Artificial Sequence
  Cyclic GFR-binding peptide
  MOD_RES (14)..(14): Xaa is C or S
IKRVQVPRLKTPAX

SEQ ID NO: 7875 - protein, 18 aa, Artificial Sequence
  Cyclic GFR-binding peptide
FIPKKRVIEVKAVKVSRL

SEQ ID NO: 7876 - protein, 20 aa, Artificial Sequence
  Cyclic GFR-binding peptide
LKPKKRVYEVKAVKVSRHHV

SEQ ID NO: 7877 - protein, 17 aa, Artificial Sequence
  Cyclic GFR-binding peptide
FIPKKRVIEMIQVTINS

SEQ ID NO: 7878 - protein, 17 aa, Artificial Sequence
  Cyclic GFR-binding peptide
QLSNITVQIMDDSSNVI

SEQ ID NO: 7879 - protein, 15 aa, Artificial Sequence
  Cyclic GFR-binding peptide
  MOD_RES (1)..(2): Xaa is C or S
XXVSQDLRSVKIAKV

SEQ ID NO: 7880 - protein, 17 aa, Artificial Sequence
  Cyclic GFR-binding peptide
EPLPMVYYRIKPHQGQH

SEQ ID NO: 7881 - protein, 27 aa, Artificial Sequence
  Cyclic GFR-binding peptide
  MOD_RES (6)..(7): Xaa is C or S
SIPKAXXVPTELEPLPMVYYDEYDKVV

SEQ ID NO: 7882 - protein, 15 aa, Artificial Sequence
  Cyclic GFR-binding peptide
RSVKIAKVIGKTPKI

SEQ ID NO: 7883 - protein, 13 aa, Artificial Sequence
  Cyclic GFR-binding peptide
VPQDLEPLPIVYY

SEQ ID NO: 7884 - protein, 15 aa, Artificial Sequence
  Cyclic GFR-binding peptide
  MOD_RES (2)..(2): Xaa is C or S
TXAPTKLRSVKVAKV

SEQ ID NO: 7885 - protein, 20 aa, Artificial Sequence
  Cyclic GFR-binding peptide
  MOD_RES (6)..(7): Xaa is C or S
YVPKPXXAPTKLRSVKVAKV

SEQ ID NO: 7886 - protein, 19 aa, Artificial Sequence
  Cyclic GFR-binding peptide
  MOD_RES (5)..(6): Xaa is C or S
VPKPXXAPTKLEPLTVLYY

SEQ ID NO: 7887 - protein, 17 aa, Artificial Sequence
  Cyclic GFR-binding peptide
  MOD_RES (3)..(4): Xaa is C or S
KPXXAPTQLEPLTVLYY

SEQ ID NO: 7888 - protein, 19 aa, Artificial Sequence
  Cyclic GFR-binding peptide
  MOD_RES (6)..(6): Xaa is C or S
VTKPTXAPTKLRPVQVRKI

SEQ ID NO: 7889 - protein, 18 aa, Artificial Sequence
  Cyclic GFR-binding peptide
  MOD_RES (5)..(5): Xaa is C or S
TKPTXAPTKLEPLTVLYY

SEQ ID NO: 7890 - protein, 16 aa, Artificial Sequence
  Cyclic GFR-binding peptide
  MOD_RES (2)..(3): Xaa is C or S
PXXAPTKLEPLPVVYY

SEQ ID NO: 7891 - protein, 16 aa, Artificial Sequence
  Cyclic GFR-binding peptide
  MOD_RES (3)..(3): Xaa is C or S
PTXAPTKLEPLTVLYY

SEQ ID NO: 7892 - protein, 20 aa, Artificial Sequence
  Cyclic GFR-binding peptide
  MOD_RES (6)..(7): Xaa is C or S
ASAAPXXVPQALSNITIQIM

SEQ ID NO: 7893 - protein, 19 aa, Artificial Sequence
  Cyclic GFR-binding peptide
EERPVQMRKIRIKPHQGQH

SEQ ID NO: 7894 - protein, 19 aa, Artificial Sequence
  Cyclic GFR-binding peptide
  MOD_RES (5)..(6): Xaa is C or S
VPKPXXAPTQLRSVKVAKV

SEQ ID NO: 7895 - protein, 13 aa, Artificial Sequence
  Cyclic GFR-binding peptide
TQVQLSNITVQIM

SEQ ID NO: 7896 - protein, 19 aa, Artificial Sequence
  Cyclic GFR-binding peptide
  MOD_RES (6)..(6): Xaa is C or S
DEGLEXVPTEERSVKMAKV

SEQ ID NO: 7897 - protein, 16 aa, Artificial Sequence
  Cyclic GFR-binding peptide
  MOD_RES (2)..(3): Xaa is C or S
PXXVSQDLRSVKIAKV

SEQ ID NO: 7898 - protein, 17 aa, Artificial Sequence
  Cyclic GFR-binding peptide
RPVQVRKIEYVRKKPKL

SEQ ID NO: 7899 - protein, 18 aa, Artificial Sequence
  Cyclic GFR-binding peptide
QDLRPVQIRKIIGKTPKI

SEQ ID NO: 7900 - protein, 16 aa, Artificial Sequence
  Cyclic GFR-binding peptide
LRSVKMAKVDENEKVV

SEQ ID NO: 7901 - protein, 17 aa, Artificial Sequence
  Cyclic GFR-binding peptide
KLSNITVQIMDDSSNVI

SEQ ID NO: 7902 - protein, 13 aa, Artificial Sequence
  Cyclic GFR-binding peptide
VPTEERSVKMAKV

SEQ ID NO: 7903 - protein, 13 aa, Artificial Sequence
  Cyclic GFR-binding peptide
VPTELEPLTMLYY

SEQ ID NO: 7904 - protein, 19 aa, Artificial Sequence
  Cyclic GFR-binding peptide
  MOD_RES (5)..(6): Xaa is C or S
VPKPXXAPTKLEPLPVVYY

SEQ ID NO: 7905 - protein, 15 aa, Artificial Sequence
  Cyclic GFR-binding peptide
  MOD_RES (1)..(2): Xaa is C or S
XXVPTELEPLTMLYY

SEQ ID NO: 7906 - protein, 21 aa, Artificial Sequence
  Cyclic GFR-binding peptide
RVHHRPVQVRKIEYVRKKPKL

SEQ ID NO: 7907 - protein, 14 aa, Artificial Sequence
  Cyclic GFR-binding peptide
PSRVHHSNITVQIM

SEQ ID NO: 7908 - protein, 20 aa, Artificial Sequence
  Cyclic GFR-binding peptide
  MOD_RES (7)..(7): Xaa is C or S
HVTKPTXAPTKLRSVKVAKV

SEQ ID NO: 7909 - protein, 16 aa, Artificial Sequence
  Cyclic GFR-binding peptide
  MOD_RES (2)..(3): Xaa is C or S
PXXVPQDLEPLPIVYY

SEQ ID NO: 7910 - protein, 13 aa, Artificial Sequence
  Cyclic GFR-binding peptide
APTKLRSVKVAKV

SEQ ID NO: 7911 - protein, 16 aa, Artificial Sequence
  Cyclic GFR-binding peptide
LRPVQMRKIDENEKVV

SEQ ID NO: 7912 - protein, 20 aa, Artificial Sequence
  Cyclic GFR-binding peptide
  MOD_RES (6)..(7): Xaa is C or S
ASASPXXVSQDLEPLPIVYY

SEQ ID NO: 7913 - protein, 17 aa, Artificial Sequence
  Cyclic GFR-binding peptide
  MOD_RES (3)..(4): Xaa is C or S
KPXXAPTQLEPLPVVYY

SEQ ID NO: 7914 - protein, 17 aa, Artificial Sequence
  Cyclic GFR-binding peptide
RSVKMAKVRIKPHQGQH

SEQ ID NO: 7915 - protein, 17 aa, Artificial Sequence
  Cyclic GFR-binding peptide
DLEPLPIVYYVGRTPKV

SEQ ID NO: 7916 - protein, 18 aa, Artificial Sequence
  Cyclic GFR-binding peptide
QDLRSVKIAKVIGKTPKI

SEQ ID NO: 7917 - protein, 17 aa, Artificial Sequence
  Cyclic GFR-binding peptide
  MOD_RES (3)..(4): Xaa is C or S
APXXVPQALRPVQIRKI

SEQ ID NO: 7918 - protein, 14 aa, Artificial Sequence
  Cyclic GFR-binding peptide
  MOD_RES (1)..(1): Xaa is C or S
XAPTQLEPLPVVYY

SEQ ID NO: 7919 - protein, 18 aa, Artificial Sequence
  Cyclic GFR-binding peptide
TELEPLTMLYYDENEKVV

SEQ ID NO: 7920 - protein, 18 aa, Artificial Sequence
  Cyclic GFR-binding peptide
TELSNITMQIMDEYDKVV

SEQ ID NO: 7921 - protein, 17 aa, Artificial Sequence
  Cyclic GFR-binding peptide
  MOD_RES (4)..(4): Xaa is C or S
KPTXAPTKLEPLPVVYY

SEQ ID NO: 7922 - protein, 15 aa, Artificial Sequence
  Cyclic GFR-binding peptide
RPTQVQLEPLTVLYY

SEQ ID NO: 7923 - protein, 18 aa, Artificial Sequence
  Cyclic GFR-binding peptide
  MOD_RES (4)..(5): Xaa is C or S
PKPXXAPTQLSNITVQIM

SEQ ID NO: 7924 - protein, 14 aa, Artificial Sequence
  Cyclic GFR-binding peptide
  MOD_RES (1)..(1): Xaa is C or S
XVPTELSNITMQIM

SEQ ID NO: 7925 - protein, 15 aa, Artificial Sequence
  Cyclic GFR-binding peptide
  MOD_RES (2)..(2): Xaa is C or S
EXVPTEERSVKMAKV

SEQ ID NO: 7926 - protein, 13 aa, Artificial Sequence
  Cyclic GFR-binding peptide
VSQDLRSVKIAKV

SEQ ID NO: 7927 - protein, 14 aa, Artificial Sequence
  Cyclic GFR-binding peptide
  MOD_RES (1)..(1): Xaa is C or S
XVPTEERPVQMRKI

SEQ ID NO: 7928 - protein, 27 aa, Artificial Sequence
  Cyclic GFR-binding peptide
  MOD_RES (6)..(7): Xaa is C or S
ASAAPXXVPQALRPVQIRKIVGRKPKV

SEQ ID NO: 7929 - protein, 16 aa, Artificial Sequence
  Cyclic GFR-binding peptide
  MOD_RES (3)..(3): Xaa is C or S
PTXAPTKLEPLPVVYY

SEQ ID NO: 7930 - protein, 17 aa, Artificial Sequence
  Cyclic GFR-binding peptide
  MOD_RES (3)..(4): Xaa is C or S
SPXXVSQDLEPLPIVYY

SEQ ID NO: 7931 - protein, 16 aa, Artificial Sequence
  Cyclic GFR-binding peptide
  MOD_RES (2)..(3): Xaa is C or S
PXXAPTKLEPLTVLYY

SEQ ID NO: 7932 - protein, 15 aa, Artificial Sequence
  Cyclic GFR-binding peptide
QPSRVHHSNITVQIM

SEQ ID NO: 7933 - protein, 15 aa, Artificial Sequence
  Cyclic GFR-binding peptide
RPVQIRKIVGRKPKV

SEQ ID NO: 7934 - protein, 20 aa, Artificial Sequence
  Cyclic GFR-binding peptide
VQLEPLTVLYYEIVRKKPIF

SEQ ID NO: 7935 - protein, 19 aa, Artificial Sequence
  Cyclic GFR-binding peptide
PTKLEPLPVVYYDDSSNVI

SEQ ID NO: 7936 - protein, 14 aa, Artificial Sequence
  Cyclic GFR-binding peptide
  MOD_RES (1)..(1): Xaa is C or S
XVPQDLSNITIQIM

SEQ ID NO: 7937 - protein, 15 aa, Artificial Sequence
  Cyclic GFR-binding peptide
EPLPMVYYDENEKVV

SEQ ID NO: 7938 - protein, 19 aa, Artificial Sequence
  Cyclic GFR-binding peptide
PTQLEPLPVVYYDDSSNVI

SEQ ID NO: 7939 - protein, 20 aa, Artificial Sequence
  Cyclic GFR-binding peptide
  MOD_RES (6)..(7): Xaa is C or S
KIPKAXXVPTELEPLTMLYY

SEQ ID NO: 7940 - protein, 14 aa, Artificial Sequence
  Cyclic GFR-binding peptide
  MOD_RES (1)..(1): Xaa is C or S
XVPTEEEPLTMLYY

SEQ ID NO: 7941 - protein, 18 aa, Artificial Sequence
  Cyclic GFR-binding peptide
  MOD_RES (5)..(5): Xaa is C or S
TKPTXAPTKLRPVQVRKI

SEQ ID NO: 7942 - protein, 15 aa, Artificial Sequence
  Cyclic GFR-binding peptide
EPLTMLYYDEYDKVV

SEQ ID NO: 7943 - protein, 17 aa, Artificial Sequence
  Cyclic GFR-binding peptide
ELSNITMQIMDENEKVV

SEQ ID NO: 7944 - protein, 14 aa, Artificial Sequence
  Cyclic GFR-binding peptide
  MOD_RES (1)..(1): Xaa is C or S
XVPTELRPVQMRKI

SEQ ID NO: 7945 - protein, 15 aa, Artificial Sequence
  Cyclic GFR-binding peptide
  MOD_RES (1)..(2): Xaa is C or S
XXAPTKLEPLPVVYY

SEQ ID NO: 7946 - protein, 16 aa, Artificial Sequence
  Cyclic GFR-binding peptide
LSNITMQIMDENEKVV

SEQ ID NO: 7947 - protein, 13 aa, Artificial Sequence
  Cyclic GFR-binding peptide
APTKLEPLPVVYY

SEQ ID NO: 7948 - protein, 17 aa, Artificial Sequence
  Cyclic GFR-binding peptide
  MOD_RES (3)..(4): Xaa is C or S
KPXXAPTQLRPVQVRKI

SEQ ID NO: 7949 - protein, 27 aa, Artificial Sequence
  Cyclic GFR-binding peptide
  MOD_RES (6)..(7): Xaa is C or S
ASAAPXXVPQALRSVKIAKVVGRKPKV

SEQ ID NO: 7950 - protein, 18 aa, Artificial Sequence
  Cyclic GFR-binding peptide
QDLSNITIQIMIGKTPKI

SEQ ID NO: 7951 - protein, 20 aa, Artificial Sequence
  Cyclic GFR-binding peptide
  MOD_RES (6)..(7): Xaa is C or S
SIPKAXXVPTELEPLPMVYY

SEQ ID NO: 7952 - protein, 17 aa, Artificial Sequence
  Cyclic GFR-binding peptide
  MOD_RES (3)..(4): Xaa is C or S
KPXXAPTKLRPVQVRKI

SEQ ID NO: 7953 - protein, 29 aa, Artificial Sequence
  Cyclic GFR-binding peptide
  MOD_RES (5)..(5): Xaa is C or S
RNVQXRPTQVQLSNITVQIMEIVRKKPIF

SEQ ID NO: 7954 - protein, 17 aa, Artificial Sequence
  Cyclic GFR-binding peptide
  MOD_RES (2)..(2): Xaa is C or S
KXQPSRVHHEPLPVVYY

SEQ ID NO: 7955 - protein, 20 aa, Artificial Sequence
  Cyclic GFR-binding peptide
  MOD_RES (6)..(7): Xaa is C or S
ASASPXXVPQDLRPVQIRKI

SEQ ID NO: 7956 - protein, 14 aa, Artificial Sequence
  Cyclic GFR-binding peptide
PTQVQLSNITVQIM

SEQ ID NO: 7957 - protein, 17 aa, Artificial Sequence
  Cyclic GFR-binding peptide
  MOD_RES (3)..(4): Xaa is C or S
APXXVPQALSNITIQIM

SEQ ID NO: 7958 - protein, 18 aa, Artificial Sequence
  Cyclic GFR-binding peptide
TELRSVKMAKVDEYDKVV

SEQ ID NO: 7959 - protein, 15 aa, Artificial Sequence
  Cyclic GFR-binding peptide
RSVKIAKVVGRKPKV

SEQ ID NO: 7960 - protein, 21 aa, Artificial Sequence
  Cyclic GFR-binding peptide
PTEERSVKMAKVRIKPHQGQH

SEQ ID NO: 7961 - protein, 14 aa, Artificial Sequence
  Cyclic GFR-binding peptide
  MOD_RES (1)..(1): Xaa is C or S
XAPTKLEPLTVLYY

SEQ ID NO: 7962 - protein, 16 aa, Artificial Sequence
  Cyclic GFR-binding peptide
  MOD_RES (2)..(3): Xaa is C or S
PXXVPQALRSVKIAKV

SEQ ID NO: 7963 - protein, 18 aa, Artificial Sequence
  Cyclic GFR-binding peptide
  MOD_RES (4)..(5): Xaa is C or S
PKAXXVPTELSNITMQIM

SEQ ID NO: 7964 - protein, 17 aa, Artificial Sequence
  Cyclic GFR-binding peptide
  MOD_RES (4)..(4): Xaa is C or S
KPTXAPTKLEPLTVLYY

SEQ ID NO: 7965 - protein, 17 aa, Artificial Sequence
  Cyclic GFR-binding peptide
  MOD_RES (3)..(4): Xaa is C or S
KAXXVPTELSNITMQIM

SEQ ID NO: 7966 - protein, 19 aa, Artificial Sequence
  Cyclic GFR-binding peptide
PQALEPLTILYYVGRKPKV

SEQ ID NO: 7967 - protein, 17 aa, Artificial Sequence
  Cyclic GFR-binding peptide
ELEPLPMVYYDENEKVV

SEQ ID NO: 7968 - protein, 19 aa, Artificial Sequence
  Cyclic GFR-binding peptide
  MOD_RES (6)..(6): Xaa is C or S
VTKPTXAPTKLEPLTVLYY

SEQ ID NO: 7969 - protein, 17 aa, Artificial Sequence
  Cyclic GFR-binding peptide
  MOD_RES (3)..(4): Xaa is C or S
SPXXVSQDLRSVKIAKV

SEQ ID NO: 7970 - protein, 27 aa, Artificial Sequence
  Cyclic GFR-binding peptide
  MOD_RES (6)..(7): Xaa is C or S
ASASPXXVSQDLRSVKIAKVIGKTPKI

SEQ ID NO: 7971 - protein, 19 aa, Artificial Sequence
  Cyclic GFR-binding peptide
PTELRSVKMAKVDEYDKVV

SEQ ID NO: 7972 - protein, 15 aa, Artificial Sequence
  Cyclic GFR-binding peptide
  MOD_RES (2)..(2): Xaa is C or S
TXAPTKLEPLPVVYY

SEQ ID NO: 7973 - protein, 20 aa, Artificial Sequence
  Cyclic GFR-binding peptide
  MOD_RES (6)..(7): Xaa is C or S
ASAAPXXVPQALRPVQIRKI

SEQ ID NO: 7974 - protein, 13 aa, Artificial Sequence
  Cyclic GFR-binding peptide
VPTELRPVQMRKI

SEQ ID NO: 7975 - protein, 16 aa, Artificial Sequence
  Cyclic GFR-binding peptide
  MOD_RES (2)..(3): Xaa is C or S
AXXVPTELEPLTMLYY

SEQ ID NO: 7976 - protein, 18 aa, Artificial Sequence
  Cyclic GFR-binding peptide
QALEPLTILYYVGRKPKV

SEQ ID NO: 7977 - protein, 15 aa, Artificial Sequence
  Cyclic GFR-binding peptide
  MOD_RES (1)..(2): Xaa is C or S
XXAPTKLRSVKVAKV

SEQ ID NO: 7978 - protein, 16 aa, Artificial Sequence
  Cyclic GFR-binding peptide
LEPLPIVYYVGRTPKV

SEQ ID NO: 7979 - protein, 14 aa, Artificial Sequence
  Cyclic GFR-binding peptide
  MOD_RES (1)..(1): Xaa is C or S
XAPTQLEPLTVLYY

SEQ ID NO: 7980 - protein, 15 aa, Artificial Sequence
  Cyclic GFR-binding peptide
  MOD_RES (1)..(2): Xaa is C or S
XXVPQDLEPLPIVYY

SEQ ID NO: 7981 - protein, 18 aa, Artificial Sequence
  Cyclic GFR-binding peptide
TELRPVQMRKIDEYDKVV

SEQ ID NO: 7982 - protein, 19 aa, Artificial Sequence
  Cyclic GFR-binding peptide
EEEPLTMLYYRIKPHQGQH

SEQ ID NO: 7983 - protein, 29 aa, Artificial Sequence
  Cyclic GFR-binding peptide
  MOD_RES (5)..(5): Xaa is C or S
RNVQXRPTQVQLRSVKVAKVEIVRKKPIF

SEQ ID NO: 7984 - protein, 19 aa, Artificial Sequence
  Cyclic GFR-binding peptide
  MOD_RES (5)..(6): Xaa is C or S
SASPXXVSQDLRSVKIAKV

SEQ ID NO: 7985 - protein, 16 aa, Artificial Sequence
  Cyclic GFR-binding peptide
LSNITVQIMDDSSNVI

SEQ ID NO: 7986 - protein, 20 aa, Artificial Sequence
  Cyclic GFR-binding peptide
  MOD_RES (7)..(7): Xaa is C or S
HVTKPTXAPTKLEPLPVVYY

SEQ ID NO: 7987 - protein, 19 aa, Artificial Sequence
  Cyclic GFR-binding peptide
QLEPLTVLYYEIVRKKPIF

SEQ ID NO: 7988 - protein, 14 aa, Artificial Sequence
  Cyclic GFR-binding peptide
  MOD_RES (1)..(1): Xaa is C or S
XVPTEEEPLPMVYY

SEQ ID NO: 7989 - protein, 27 aa, Artificial Sequence
  Cyclic GFR-binding peptide
  MOD_RES (6)..(7): Xaa is C or S
ASAAPXXVPQALSNITIQIMVGRKPKV

SEQ ID NO: 7990 - protein, 19 aa, Artificial Sequence
  Cyclic GFR-binding peptide
  MOD_RES (5)..(6): Xaa is C or S
IPKAXXVPTELRSVKMAKV

SEQ ID NO: 7991 - protein, 19 aa, Artificial Sequence
  Cyclic GFR-binding peptide
  MOD_RES (5)..(6): Xaa is C or S
IPKAXXVPTELEPLTMLYY

SEQ ID NO: 7992 - protein, 27 aa, Artificial Sequence
  Cyclic GFR-binding peptide
  MOD_RES (6)..(7): Xaa is C or S
ASASPXXVSQDLRPVQIRKIIGKTPKI

SEQ ID NO: 7993 - protein, 19 aa, Artificial Sequence
  Cyclic GFR-binding peptide
PTELRPVQMRKIDEYDKVV

SEQ ID NO: 7994 - protein, 17 aa, Artificial Sequence
  Cyclic GFR-binding peptide
  MOD_RES (3)..(4): Xaa is C or S
KAXXVPTELEPLTMLYY

SEQ ID NO: 7995 - protein, 29 aa, Artificial Sequence
  Cyclic GFR-binding peptide
  MOD_RES (5)..(5): Xaa is C or S
SSVKXQPSRVHHEPLTVLYYEYVRKKPKL

SEQ ID NO: 7996 - protein, 20 aa, Artificial Sequence
  Cyclic GFR-binding peptide
  MOD_RES (7)..(7): Xaa is C or S
NDEGLEXVPTEEEPLTMLYY

SEQ ID NO: 7997 - protein, 19 aa, Artificial Sequence
  Cyclic GFR-binding peptide
PTELEPLTMLYYDENEKVV

SEQ ID NO: 7998 - protein, 17 aa, Artificial Sequence
  Cyclic GFR-binding peptide
KLRPVQVRKIDDSSNVI

SEQ ID NO: 7999 - protein, 14 aa, Artificial Sequence
  Cyclic GFR-binding peptide
  MOD_RES (1)..(1): Xaa is C or S
XVPQALRSVKIAKV

SEQ ID NO: 8000 - protein, 16 aa, Artificial Sequence
  Cyclic GFR-binding peptide
LRPVQVRKIDDSSNVI

SEQ ID NO: 8001 - protein, 15 aa, Artificial Sequence
  Cyclic GFR-binding peptide
  MOD_RES (1)..(2): Xaa is C or S
XXVPTELRPVQMRKI

SEQ ID NO: 8002 - protein, 27 aa, Artificial Sequence
  Cyclic GFR-binding peptide
  MOD_RES (6)..(7): Xaa is C or S
ASASPXXVSQDLSNITIQIMIGKTPKI

SEQ ID NO: 8003 - protein, 18 aa, Artificial Sequence
  Cyclic GFR-binding peptide
  MOD_RES (3)..(3): Xaa is C or S
VKXQPSRVHHRPVQVRKI

SEQ ID NO: 8004 - protein, 17 aa, Artificial Sequence
  Cyclic GFR-binding peptide
  MOD_RES (3)..(4): Xaa is C or S
APXXVPQALEPLTILYY

SEQ ID NO: 8005 - protein, 17 aa, Artificial Sequence
  Cyclic GFR-binding peptide
  MOD_RES (2)..(2): Xaa is C or S
KXQPSRVHHRPVQVRKI

SEQ ID NO: 8006 - protein, 14 aa, Artificial Sequence
  Cyclic GFR-binding peptide
  MOD_RES (1)..(1): Xaa is C or S
XVSQDLRPVQIRKI

SEQ ID NO: 8007 - protein, 19 aa, Artificial Sequence
  Cyclic GFR-binding peptide
  MOD_RES (5)..(6): Xaa is C or S
SASPXXVPQDLEPLPIVYY

SEQ ID NO: 8008 - protein, 15 aa, Artificial Sequence
  Cyclic GFR-binding peptide
  MOD_RES (2)..(2): Xaa is C or S
EXVPTEEEPLTMLYY

SEQ ID NO: 8009 - protein, 16 aa, Artificial Sequence
  Cyclic GFR-binding peptide
  MOD_RES (2)..(3): Xaa is C or S
AXXVPTELRSVKMAKV

SEQ ID NO: 8010 - protein, 17 aa, Artificial Sequence
  Cyclic GFR-binding peptide
QLRPVQVRKIDDSSNVI

SEQ ID NO: 8011 - protein, 17 aa, Artificial Sequence
  Cyclic GFR-binding peptide
  MOD_RES (4)..(4): Xaa is C or S
GLEXVPTEERSVKMAKV

SEQ ID NO: 8012 - protein, 27 aa, Artificial Sequence
  Cyclic GFR-binding peptide
  MOD_RES (6)..(7): Xaa is C or S
YVPKPXXAPTKLEPLTVLYYDDSSNVI

SEQ ID NO: 8013 - protein, 14 aa, Artificial Sequence
  Cyclic GFR-binding peptide
  MOD_RES (1)..(1): Xaa is C or S
XAPTKLSNITVQIM

SEQ ID NO: 8014 - protein, 13 aa, Artificial Sequence
  Cyclic GFR-binding peptide
APTQLRSVKVAKV

SEQ ID NO: 8015 - protein, 19 aa, Artificial Sequence
  Cyclic GFR-binding peptide
EERSVKMAKVRIKPHQGQH

SEQ ID NO: 8016 - protein, 19 aa, Artificial Sequence
  Cyclic GFR-binding peptide
PTELSNITMQIMDEYDKVV

SEQ ID NO: 8017 - protein, 15 aa, Artificial Sequence
  Cyclic GFR-binding peptide
  MOD_RES (1)..(2): Xaa is C or S
XXAPTQLRSVKVAKV

SEQ ID NO: 8018 - protein, 16 aa, Artificial Sequence
  Cyclic GFR-binding peptide
  MOD_RES (1)..(1): Xaa is C or S
XQPSRVHHRPVQVRKI

SEQ ID NO: 8019 - protein, 16 aa, Artificial Sequence
  Cyclic GFR-binding peptide
LRSVKVAKVDDSSNVI

SEQ ID NO: 8020 - protein, 29 aa, Artificial Sequence
  Cyclic GFR-binding peptide
  MOD_RES (5)..(5): Xaa is C or S
SSVKXQPSRVHHSNITVQIMEYVRKKPKL

SEQ ID NO: 8021 - protein, 16 aa, Artificial Sequence
  Cyclic GFR-binding peptide
  MOD_RES (1)..(1): Xaa is C or S
XRPTQVQLEPLPVVYY

SEQ ID NO: 8022 - protein, 17 aa, Artificial Sequence
  Cyclic GFR-binding peptide
KLRSVKVAKVDDSSNVI

SEQ ID NO: 8023 - protein, 14 aa, Artificial Sequence
  Cyclic GFR-binding peptide
  MOD_RES (1)..(1): Xaa is C or S
XVSQDLEPLPIVYY

SEQ ID NO: 8024 - protein, 17 aa, Artificial Sequence
  Cyclic GFR-binding peptide
  MOD_RES (3)..(4): Xaa is C or S
SPXXVPQDLSNITIQIM

SEQ ID NO: 8025 - protein, 13 aa, Artificial Sequence
  Cyclic GFR-binding peptide
VPTELEPLPMVYY

SEQ ID NO: 8026 - protein, 17 aa, Artificial Sequence
  Cyclic GFR-binding peptide
QLRSVKVAKVDDSSNVI

SEQ ID NO: 8027 - protein, 15 aa, Artificial Sequence
  Cyclic GFR-binding peptide
  MOD_RES (1)..(2): Xaa is C or S
XXVPTELEPLPMVYY

SEQ ID NO: 8028 - protein, 13 aa, Artificial Sequence
  Cyclic GFR-binding peptide
VPQDLRPVQIRKI

SEQ ID NO: 8029 - protein, 29 aa, Artificial Sequence
  Cyclic GFR-binding peptide
  MOD_RES (5)..(5): Xaa is C or S
SSVKXQPSRVHHRPVQVRKIEYVRKKPKL

SEQ ID NO: 8030 - protein, 15 aa, Artificial Sequence
  Cyclic GFR-binding peptide
  MOD_RES (1)..(2): Xaa is C or S
XXVPQDLRPVQIRKI

SEQ ID NO: 8031 - protein, 20 aa, Artificial Sequence
  Cyclic GFR-binding peptide
  MOD_RES (6)..(7): Xaa is C or S
KIPKAXXVPTELRSVKMAKV

SEQ ID NO: 8032 - protein, 15 aa, Artificial Sequence
  Cyclic GFR-binding peptide
  MOD_RES (1)..(2): Xaa is C or S
XXVPTELSNITMQIM

SEQ ID NO: 8033 - protein, 18 aa, Artificial Sequence
  Cyclic GFR-binding peptide
TELRSVKMAKVDENEKVV

SEQ ID NO: 8034 - protein, 16 aa, Artificial Sequence
  Cyclic GFR-binding peptide
LEPLTMLYYDEYDKVV

SEQ ID NO: 8035 - protein, 17 aa, Artificial Sequence
  Cyclic GFR-binding peptide
DLRPVQIRKIVGRTPKV

SEQ ID NO: 8036 - protein, 13 aa, Artificial Sequence
  Cyclic GFR-binding peptide
VPTEEEPLTMLYY

SEQ ID NO: 8037 - protein, 16 aa, Artificial Sequence
  Cyclic GFR-binding peptide
LEPLPMVYYDENEKVV

SEQ ID NO: 8038 - protein, 14 aa, Artificial Sequence
  Cyclic GFR-binding peptide
  MOD_RES (1)..(1): Xaa is C or S
XVPTEERSVKMAKV

SEQ ID NO: 8039 - protein, 18 aa, Artificial Sequence
  Cyclic GFR-binding peptide
QALSNITIQIMVGRKPKV

SEQ ID NO: 8040 - protein, 21 aa, Artificial Sequence
  Cyclic GFR-binding peptide
RVHHEPLPVVYYEYVRKKPKL

SEQ ID NO: 8041 - protein, 16 aa, Artificial Sequence
  Cyclic GFR-binding peptide
LRPVQIRKIIGKTPKI

SEQ ID NO: 8042 - protein, 19 aa, Artificial Sequence
  Cyclic GFR-binding peptide
  MOD_RES (6)..(6): Xaa is C or S
DEGLEXVPTEEEPLTMLYY

SEQ ID NO: 8043 - protein, 16 aa, Artificial Sequence
  Cyclic GFR-binding peptide
  MOD_RES (2)..(3): Xaa is C or S
PXXVPQDLRSVKIAKV

SEQ ID NO: 8044 - protein, 17 aa, Artificial Sequence
  Cyclic GFR-binding peptide
QLEPLPVVYYDDSSNVI

SEQ ID NO: 8045 - protein, 13 aa, Artificial Sequence
  Cyclic GFR-binding peptide
VSQDLEPLPIVYY

SEQ ID NO: 8046 - protein, 15 aa, Artificial Sequence
  Cyclic GFR-binding peptide
RPVQIRKIVGRTPKV

SEQ ID NO: 8047 - protein, 14 aa, Artificial Sequence
  Cyclic GFR-binding peptide
PTQVQLEPLPVVYY

SEQ ID NO: 8048 - protein, 17 aa, Artificial Sequence
  Cyclic GFR-binding peptide
  MOD_RES (3)..(4): Xaa is C or S
KPXXAPTQLRSVKVAKV

SEQ ID NO: 8049 - protein, 17 aa, Artificial Sequence
  Cyclic GFR-binding peptide
DLEPLPIVYYIGKTPKI

SEQ ID NO: 8050 - protein, 15 aa, Artificial Sequence
  Cyclic GFR-binding peptide
  MOD_RES (1)..(2): Xaa is C or S
XXVPQDLRSVKIAKV

SEQ ID NO: 8051 - protein, 15 aa, Artificial Sequence
  Cyclic GFR-binding peptide
RPTQVQLRSVKVAKV

SEQ ID NO: 8052 - protein, 17 aa, Artificial Sequence
  Cyclic GFR-binding peptide
KLEPLPVVYYDDSSNVI

SEQ ID NO: 8053 - protein, 19 aa, Artificial Sequence
  Cyclic GFR-binding peptide
  MOD_RES (5)..(6): Xaa is C or S
VPKPXXAPTQLEPLTVLYY

SEQ ID NO: 8054 - protein, 14 aa, Artificial Sequence
  Cyclic GFR-binding peptide
  MOD_RES (1)..(1): Xaa is C or S
XVPTELEPLTMLYY

SEQ ID NO: 8055 - protein, 19 aa, Artificial Sequence
  Cyclic GFR-binding peptide
  MOD_RES (5)..(6): Xaa is C or S
IPKAXXVPTELRPVQMRKI

SEQ ID NO: 8056 - protein, 18 aa, Artificial Sequence
  Cyclic GFR-binding peptide
  MOD_RES (3)..(3): Xaa is C or S
VKXQPSRVHHEPLPVVYY

SEQ ID NO: 8057 - protein, 15 aa, Artificial Sequence
  Cyclic GFR-binding peptide
QPSRVHHRPVQVRKI

SEQ ID NO: 8058 - protein, 16 aa, Artificial Sequence
  Cyclic GFR-binding peptide
  MOD_RES (1)..(1): Xaa is C or S
XQPSRVHHEPLPVVYY

SEQ ID NO: 8059 - protein, 15 aa, Artificial Sequence
  Cyclic GFR-binding peptide
EPLPIVYYIGKTPKI

SEQ ID NO: 8060 - protein, 19 aa, Artificial Sequence
  Cyclic GFR-binding peptide
  MOD_RES (5)..(6): Xaa is C or S
SASPXXVSQDLSNITIQIM

SEQ ID NO: 8061 - protein, 20 aa, Artificial Sequence
  Cyclic GFR-binding peptide
  MOD_RES (5)..(5): Xaa is C or S
RNVQXRPTQVQLRSVKVAKV

SEQ ID NO: 8062 - protein, 17 aa, Artificial Sequence
  Cyclic GFR-binding peptide
  MOD_RES (4)..(4): Xaa is C or S
GLEXVPTEERPVQMRKI

SEQ ID NO: 8063 - protein, 27 aa, Artificial Sequence
  Cyclic GFR-binding peptide
  MOD_RES (6)..(7): Xaa is C or S
ASASPXXVPQDLEPLPIVYYVGRTPKV

SEQ ID NO: 8064 - protein, 20 aa, Artificial Sequence
  Cyclic GFR-binding peptide
  MOD_RES (6)..(7): Xaa is C or S
YVPKPXXAPTKLEPLTVLYY

SEQ ID NO: 8065 - protein, 14 aa, Artificial Sequence
  Cyclic GFR-binding peptide
  MOD_RES (1)..(1): Xaa is C or S
XVPTELEPLPMVYY

SEQ ID NO: 8066 - protein, 19 aa, Artificial Sequence
  Cyclic GFR-binding peptide
PTELEPLTMLYYDEYDKVV

SEQ ID NO: 8067 - protein, 18 aa, Artificial Sequence
  Cyclic GFR-binding peptide
HEPLTVLYYEYVRKKPKL

SEQ ID NO: 8068 - protein, 18 aa, Artificial Sequence
  Cyclic GFR-binding peptide
QALRSVKIAKVVGRKPKV

SEQ ID NO: 8069 - protein, 18 aa, Artificial Sequence
  Cyclic GFR-binding peptide
  MOD_RES (5)..(5): Xaa is C or S
TKPTXAPTKLRSVKVAKV

SEQ ID NO: 8070 - protein, 17 aa, Artificial Sequence
  Cyclic GFR-binding peptide
  MOD_RES (3)..(4): Xaa is C or S
SPXXVSQDLRPVQIRKI

SEQ ID NO: 8071 - protein, 19 aa, Artificial Sequence
  Cyclic GFR-binding peptide
  MOD_RES (5)..(6): Xaa is C or S
SASPXXVPQDLRPVQIRKI

SEQ ID NO: 8072 - protein, 17 aa, Artificial Sequence
  Cyclic GFR-binding peptide
  MOD_RES (3)..(4): Xaa is C or S
SPXXVPQDLEPLPIVYY

SEQ ID NO: 8073 - protein, 19 aa, Artificial Sequence
  Cyclic GFR-binding peptide
SQDLSNITIQIMIGKTPKI

SEQ ID NO: 8074 - protein, 20 aa, Artificial Sequence
  Cyclic GFR-binding peptide
  MOD_RES (7)..(7): Xaa is C or S
NDEGLEXVPTEERSVKMAKV

SEQ ID NO: 8075 - protein, 16 aa, Artificial Sequence
  Cyclic GFR-binding peptide
  MOD_RES (3)..(3): Xaa is C or S
LEXVPTEERPVQMRKI

SEQ ID NO: 8076 - protein, 16 aa, Artificial Sequence
  Cyclic GFR-binding peptide
  MOD_RES (3)..(3): Xaa is C or S
PTXAPTKLRSVKVAKV

SEQ ID NO: 8077 - protein, 18 aa, Artificial Sequence
  Cyclic GFR-binding peptide
  MOD_RES (3)..(3): Xaa is C or S
VQXRPTQVQLRSVKVAKV

SEQ ID NO: 8078 - protein, 27 aa, Artificial Sequence
  Cyclic GFR-binding peptide
  MOD_RES (6)..(7): Xaa is C or S
SIPKAXXVPTELSNITMQIMDEYDKVV

SEQ ID NO: 8079 - protein, 18 aa, Artificial Sequence
  Cyclic GFR-binding peptide
TELSNITMQIMDENEKVV

SEQ ID NO: 8080 - protein, 27 aa, Artificial Sequence
  Cyclic GFR-binding peptide
  MOD_RES (6)..(7): Xaa is C or S
KIPKAXXVPTELEPLTMLYYDENEKVV

SEQ ID NO: 8081 - protein, 21 aa, Artificial Sequence
  Cyclic GFR-binding peptide
PTEERPVQMRKIRIKPHQGQH

SEQ ID NO: 8082 - protein, 16 aa, Artificial Sequence
  Cyclic GFR-binding peptide
  MOD_RES (2)..(3): Xaa is C or S
PXXVSQDLEPLPIVYY

SEQ ID NO: 8083 - protein, 20 aa, Artificial Sequence
  Cyclic GFR-binding peptide
  MOD_RES (6)..(7): Xaa is C or S
SIPKAXXVPTELEPLTMLYY

SEQ ID NO: 8084 - protein, 15 aa, Artificial Sequence
  Cyclic GFR-binding peptide
SNITIQIMVGRKPKV

SEQ ID NO: 8085 - protein, 15 aa, Artificial Sequence
  Cyclic GFR-binding peptide
RSVKMAKVDENEKVV

SEQ ID NO: 8086 - protein, 17 aa, Artificial Sequence
  Cyclic GFR-binding peptide
  MOD_RES (4)..(4): Xaa is C or S
GLEXVPTEEEPLTMLYY

SEQ ID NO: 8087 - protein, 18 aa, Artificial Sequence
  Cyclic GFR-binding peptide
  MOD_RES (5)..(5): Xaa is C or S
EGLEXVPTEEEPLTMLYY

SEQ ID NO: 8088 - protein, 18 aa, Artificial Sequence
  Cyclic GFR-binding peptide
  MOD_RES (4)..(5): Xaa is C or S
PKPXXAPTKLRSVKVAKV

SEQ ID NO: 8089 - protein, 15 aa, Artificial Sequence
  Cyclic GFR-binding peptide
QPSRVHHEPLTVLYY

SEQ ID NO: 8090 - protein, 16 aa, Artificial Sequence
  Cyclic GFR-binding peptide
  MOD_RES (2)..(3): Xaa is C or S
PXXAPTKLRPVQVRKI

SEQ ID NO: 8091 - protein, 13 aa, Artificial Sequence
  Cyclic GFR-binding peptide
VPQDLRSVKIAKV

SEQ ID NO: 8092 - protein, 17 aa, Artificial Sequence
  Cyclic GFR-binding peptide
ELRPVQMRKIDENEKVV

SEQ ID NO: 8093 - protein, 15 aa, Artificial Sequence
  Cyclic GFR-binding peptide
  MOD_RES (1)..(2): Xaa is C or S
XXVSQDLEPLPIVYY

SEQ ID NO: 8094 - protein, 20 aa, Artificial Sequence
  Cyclic GFR-binding peptide
  MOD_RES (6)..(7): Xaa is C or S
TVPKPXXAPTQLEPLTVLYY

SEQ ID NO: 8095 - protein, 29 aa, Artificial Sequence
  Cyclic GFR-binding peptide
  MOD_RES (7)..(7): Xaa is C or S
NDEGLEXVPTEEEPLTMLYYRIKPHQGQH

SEQ ID NO: 8096 - protein, 18 aa, Artificial Sequence
  Cyclic GFR-binding peptide
QDLEPLPIVYYVGRTPKV

SEQ ID NO: 8097 - protein, 13 aa, Artificial Sequence
  Cyclic GFR-binding peptide
SRVHHSNITVQIM

SEQ ID NO: 8098 - protein, 15 aa, Artificial Sequence
  Cyclic GFR-binding peptide
RSVKMAKVDEYDKVV

SEQ ID NO: 8099 - protein, 20 aa, Artificial Sequence
  Cyclic GFR-binding peptide
  MOD_RES (6)..(7): Xaa is C or S
TVPKPXXAPTQLSNITVQIM

SEQ ID NO: 8100 - protein, 19 aa, Artificial Sequence
  Cyclic GFR-binding peptide
SQDLRSVKIAKVIGKTPKI

SEQ ID NO: 8101 - protein, 18 aa, Artificial Sequence
  Cyclic GFR-binding peptide
HEPLPVVYYEYVRKKPKL

SEQ ID NO: 8102 - protein, 27 aa, Artificial Sequence
  Cyclic GFR-binding peptide
  MOD_RES (7)..(7): Xaa is C or S
HVTKPTXAPTKLEPLPVVYYDDSSNVI

SEQ ID NO: 8103 - protein, 15 aa, Artificial Sequence
  Cyclic GFR-binding peptide
RPVQVRKIDDSSNVI

SEQ ID NO: 8104 - protein, 20 aa, Artificial Sequence
  Cyclic GFR-binding peptide
  MOD_RES (5)..(5): Xaa is C or S
SSVKXQPSRVHHSNITVQIM

SEQ ID NO: 8105 - protein, 20 aa, Artificial Sequence
  Cyclic GFR-binding peptide
  MOD_RES (7)..(7): Xaa is C or S
NDEGLEXVPTEEEPLPMVYY

SEQ ID NO: 8106 - protein, 19 aa, Artificial Sequence
  Cyclic GFR-binding peptide
  MOD_RES (5)..(6): Xaa is C or S
SAAPXXVPQALEPLTILYY

SEQ ID NO: 8107 - protein, 16 aa, Artificial Sequence
  Cyclic GFR-binding peptide
LEPLPVVYYDDSSNVI

SEQ ID NO: 8108 - protein, 19 aa, Artificial Sequence
  Cyclic GFR-binding peptide
  MOD_RES (6)..(6): Xaa is C or S
DEGLEXVPTEERPVQMRKI

SEQ ID NO: 8109 - protein, 13 aa, Artificial Sequence
  Cyclic GFR-binding peptide
VPTEERPVQMRKI

SEQ ID NO: 8110 - protein, 18 aa, Artificial Sequence
  Cyclic GFR-binding peptide
  MOD_RES (3)..(3): Xaa is C or S
VKXQPSRVHHSNITVQIM

SEQ ID NO: 8111 - protein, 16 aa, Artificial Sequence
  Cyclic GFR-binding peptide
  MOD_RES (2)..(3): Xaa is C or S
PXXAPTKLRSVKVAKV

SEQ ID NO: 8112 - protein, 18 aa, Artificial Sequence
  Cyclic GFR-binding peptide
  MOD_RES (5)..(5): Xaa is C or S
EGLEXVPTEEEPLPMVYY

SEQ ID NO: 8113 - protein, 17 aa, Artificial Sequence
  Cyclic GFR-binding peptide
  MOD_RES (3)..(4): Xaa is C or S
SPXXVSQDLSNITIQIM

SEQ ID NO: 8114 - protein, 17 aa, Artificial Sequence
  Cyclic GFR-binding peptide
ELEPLTMLYYDEYDKVV

SEQ ID NO: 8115 - protein, 16 aa, Artificial Sequence
  Cyclic GFR-binding peptide
  MOD_RES (3)..(3): Xaa is C or S
PTXAPTKLRPVQVRKI

SEQ ID NO: 8116 - protein, 14 aa, Artificial Sequence
  Cyclic GFR-binding peptide
PSRVHHEPLTVLYY

SEQ ID NO: 8117 - protein, 18 aa, Artificial Sequence
  Cyclic GFR-binding peptide
QDLRSVKIAKVVGRTPKV

SEQ ID NO: 8118 - protein, 15 aa, Artificial Sequence
  Cyclic GFR-binding peptide
QPSRVHHEPLPVVYY

SEQ ID NO: 8119 - protein, 16 aa, Artificial Sequence
  Cyclic GFR-binding peptide
  MOD_RES (2)..(3): Xaa is C or S
PXXAPTQLRSVKVAKV

SEQ ID NO: 8120 - protein, 15 aa, Artificial Sequence
  Cyclic GFR-binding peptide
  MOD_RES (1)..(2): Xaa is C or S
XXVPQALRSVKIAKV

SEQ ID NO: 8121 - protein, 16 aa, Artificial Sequence
  Cyclic GFR-binding peptide
  MOD_RES (1)..(1): Xaa is C or S
XRPTQVQLRSVKVAKV

SEQ ID NO: 8122 - protein, 13 aa, Artificial Sequence
  Cyclic GFR-binding peptide
VPTELSNITMQIM

SEQ ID NO: 8123 - protein, 14 aa, Artificial Sequence
  Cyclic GFR-binding peptide
PTQVQLRSVKVAKV

SEQ ID NO: 8124 - protein, 13 aa, Artificial Sequence
  Cyclic GFR-binding peptide
SRVHHRPVQVRKI

SEQ ID NO: 8125 - protein, 29 aa, Artificial Sequence
  Cyclic GFR-binding peptide
  MOD_RES (5)..(5): Xaa is C or S
RNVQXRPTQVQLEPLPVVYYEIVRKKPIF

SEQ ID NO: 8126 - protein, 18 aa, Artificial Sequence
  Cyclic GFR-binding peptide
  MOD_RES (3)..(3): Xaa is C or S
VKXQPSRVHHEPLTVLYY

SEQ ID NO: 8127 - protein, 15 aa, Artificial Sequence
  Cyclic GFR-binding peptide
  MOD_RES (1)..(2): Xaa is C or S
XXVSQDLRPVQIRKI

SEQ ID NO: 8128 - protein, 20 aa, Artificial Sequence
  Cyclic GFR-binding peptide
  MOD_RES (5)..(5): Xaa is C or S
SSVKXQPSRVHHEPLPVVYY

SEQ ID NO: 8129 - protein, 20 aa, Artificial Sequence
  Cyclic GFR-binding peptide
  MOD_RES (6)..(7): Xaa is C or S
YVPKPXXAPTKLRPVQVRKI

SEQ ID NO: 8130 - protein, 16 aa, Artificial Sequence
  Cyclic GFR-binding peptide
  MOD_RES (2)..(3): Xaa is C or S
PXXVPQDLRPVQIRKI

SEQ ID NO: 8131 - protein, 17 aa, Artificial Sequence
  Cyclic GFR-binding peptide
  MOD_RES (2)..(2): Xaa is C or S
QXRPTQVQLSNITVQIM

SEQ ID NO: 8132 - protein, 20 aa, Artificial Sequence
  Cyclic GFR-binding peptide
VQLEPLPVVYYEIVRKKPIF

SEQ ID NO: 8133 - protein, 18 aa, Artificial Sequence
  Cyclic GFR-binding peptide
  MOD_RES (5)..(5): Xaa is C or S
EGLEXVPTEERPVQMRKI

SEQ ID NO: 8134 - protein, 20 aa, Artificial Sequence
  Cyclic GFR-binding peptide
VQLSNITVQIMEIVRKKPIF

SEQ ID NO: 8135 - protein, 15 aa, Artificial Sequence
  Cyclic GFR-binding peptide
EPLTMLYYDENEKVV

SEQ ID NO: 8136 - protein, 15 aa, Artificial Sequence
  Cyclic GFR-binding peptide
SNITMQIMDEYDKVV

SEQ ID NO: 8137 - protein, 18 aa, Artificial Sequence
  Cyclic GFR-binding peptide
TQLEPLTVLYYDDSSNVI

SEQ ID NO: 8138 - protein, 20 aa, Artificial Sequence
  Cyclic GFR-binding peptide
  MOD_RES (6)..(7): Xaa is C or S
ASASPXXVPQDLSNITIQIM

SEQ ID NO: 8139 - protein, 14 aa, Artificial Sequence
  Cyclic GFR-binding peptide
  MOD_RES (1)..(1): Xaa is C or S
XVSQDLRSVKIAKV

SEQ ID NO: 8140 - protein, 27 aa, Artificial Sequence
  Cyclic GFR-binding peptide
  MOD_RES (6)..(7): Xaa is C or S
YVPKPXXAPTKLRPVQVRKIDDSSNVI

SEQ ID NO: 8141 - protein, 13 aa, Artificial Sequence
  Cyclic GFR-binding peptide
VSQDLRPVQIRKI

SEQ ID NO: 8142 - protein, 19 aa, Artificial Sequence
  Cyclic GFR-binding peptide
  MOD_RES (5)..(6): Xaa is C or S
SAAPXXVPQALSNITIQIM

SEQ ID NO: 8143 - protein, 18 aa, Artificial Sequence
  Cyclic GFR-binding peptide
QDLSNITIQIMVGRTPKV

SEQ ID NO: 8144 - protein, 19 aa, Artificial Sequence
  Cyclic GFR-binding peptide
  MOD_RES (5)..(6): Xaa is C or S
IPKAXXVPTELEPLPMVYY

SEQ ID NO: 8145 - protein, 18 aa, Artificial Sequence
  Cyclic GFR-binding peptide
TKLEPLTVLYYDDSSNVI

SEQ ID NO: 8146 - protein, 15 aa, Artificial Sequence
  Cyclic GFR-binding peptide
SNITIQIMIGKTPKI

SEQ ID NO: 8147 - protein, 19 aa, Artificial Sequence
  Cyclic GFR-binding peptide
  MOD_RES (6)..(6): Xaa is C or S
DEGLEXVPTEEEPLPMVYY

SEQ ID NO: 8148 - protein, 17 aa, Artificial Sequence
  Cyclic GFR-binding peptide
  MOD_RES (3)..(4): Xaa is C or S
SPXXVPQDLRPVQIRKI

SEQ ID NO: 8149 - protein, 20 aa, Artificial Sequence
  Cyclic GFR-binding peptide
  MOD_RES (7)..(7): Xaa is C or S
NDEGLEXVPTEERPVQMRKI

SEQ ID NO: 8150 - protein, 19 aa, Artificial Sequence
  Cyclic GFR-binding peptide
HHRPVQVRKIEYVRKKPKL

SEQ ID NO: 8151 - protein, 18 aa, Artificial Sequence
  Cyclic GFR-binding peptide
  MOD_RES (4)..(5): Xaa is C or S
AAPXXVPQALRSVKIAKV

SEQ ID NO: 8152 - protein, 13 aa, Artificial Sequence
  Cyclic GFR-binding peptide
VPTEEEPLPMVYY

SEQ ID NO: 8153 - protein, 13 aa, Artificial Sequence
  Cyclic GFR-binding peptide
VPQALRSVKIAKV

SEQ ID NO: 8154 - protein, 16 aa, Artificial Sequence
  Cyclic GFR-binding peptide
LEPLTILYYVGRKPKV

SEQ ID NO: 8155 - protein, 15 aa, Artificial Sequence
  Cyclic GFR-binding peptide
  MOD_RES (2)..(2): Xaa is C or S
TXAPTKLEPLTVLYY

SEQ ID NO: 8156 - protein, 16 aa, Artificial Sequence
  Cyclic GFR-binding peptide
  MOD_RES (3)..(3): Xaa is C or S
LEXVPTEERSVKMAKV

SEQ ID NO: 8157 - protein, 19 aa, Artificial Sequence
  Cyclic GFR-binding peptide
PTELRPVQMRKIDENEKVV

SEQ ID NO: 8158 - protein, 13 aa, Artificial Sequence
  Cyclic GFR-binding peptide
SRVHHEPLPVVYY

SEQ ID NO: 8159 - protein, 19 aa, Artificial Sequence
  Cyclic GFR-binding peptide
  MOD_RES (5)..(6): Xaa is C or S
SASPXXVSQDLEPLPIVYY

SEQ ID NO: 8160 - protein, 19 aa, Artificial Sequence
  Cyclic GFR-binding peptide
PQALRPVQIRKIVGRKPKV

SEQ ID NO: 8161 - protein, 18 aa, Artificial Sequence
  Cyclic GFR-binding peptide
TELEPLPMVYYDEYDKVV

SEQ ID NO: 8162 - protein, 16 aa, Artificial Sequence
  Cyclic GFR-binding peptide
  MOD_RES (1)..(1): Xaa is C or S
XQPSRVHHEPLTVLYY

SEQ ID NO: 8163 - protein, 27 aa, Artificial Sequence
  Cyclic GFR-binding peptide
  MOD_RES (6)..(7): Xaa is C or S
TVPKPXXAPTQLEPLTVLYYDDSSNVI

SEQ ID NO: 8164 - protein, 16 aa, Artificial Sequence
  Cyclic GFR-binding peptide
  MOD_RES (1)..(1): Xaa is C or S
XQPSRVHHSNITVQIM

SEQ ID NO: 8165 - protein, 19 aa, Artificial Sequence
  Cyclic GFR-binding peptide
  MOD_RES (5)..(6): Xaa is C or S
SASPXXVPQDLRSVKIAKV

SEQ ID NO: 8166 - protein, 19 aa, Artificial Sequence
  Cyclic GFR-binding peptide
QLEPLPVVYYEIVRKKPIF

SEQ ID NO: 8167 - protein, 20 aa, Artificial Sequence
  Cyclic GFR-binding peptide
  MOD_RES (6)..(7): Xaa is C or S
YVPKPXXAPTKLEPLPVVYY

SEQ ID NO: 8168 - protein, 18 aa, Artificial Sequence
  Cyclic GFR-binding peptide
HSNITVQIMEYVRKKPKL

SEQ ID NO: 8169 - protein, 17 aa, Artificial Sequence
  Cyclic GFR-binding peptide
  MOD_RES (4)..(4): Xaa is C or S
GLEXVPTEEEPLPMVYY

SEQ ID NO: 8170 - protein, 13 aa, Artificial Sequence
  Cyclic GFR-binding peptide
TQVQLRSVKVAKV

SEQ ID NO: 8171 - protein, 27 aa, Artificial Sequence
  Cyclic GFR-binding peptide
  MOD_RES (6)..(7): Xaa is C or S
KIPKAXXVPTELRSVKMAKVDENEKVV

SEQ ID NO: 8172 - protein, 27 aa, Artificial Sequence
  Cyclic GFR-binding peptide
  MOD_RES (6)..(7): Xaa is C or S
TVPKPXXAPTQLSNITVQIMDDSSNVI

SEQ ID NO: 8173 - protein, 16 aa, Artificial Sequence
  Cyclic GFR-binding peptide
  MOD_RES (2)..(3): Xaa is C or S
PXXVPQALRPVQIRKI

SEQ ID NO: 8174 - protein, 27 aa, Artificial Sequence
  Cyclic GFR-binding peptide
  MOD_RES (6)..(7): Xaa is C or S
ASASPXXVPQDLRSVKIAKVVGRTPKV

SEQ ID NO: 8175 - protein, 17 aa, Artificial Sequence
  Cyclic GFR-binding peptide
ELSNITMQIMDEYDKVV

SEQ ID NO: 8176 - protein, 20 aa, Artificial Sequence
  Cyclic GFR-binding peptide
  MOD_RES (6)..(7): Xaa is C or S
SIPKAXXVPTELSNITMQIM

SEQ ID NO: 8177 - protein, 21 aa, Artificial Sequence
  Cyclic GFR-binding peptide
PTEEEPLTMLYYRIKPHQGQH

SEQ ID NO: 8178 - protein, 18 aa, Artificial Sequence
  Cyclic GFR-binding peptide
ERPVQMRKIRIKPHQGQH

SEQ ID NO: 8179 - protein, 20 aa, Artificial Sequence
  Cyclic GFR-binding peptide
  MOD_RES (6)..(7): Xaa is C or S
ASASPXXVPQDLRSVKIAKV

SEQ ID NO: 8180 - protein, 17 aa, Artificial Sequence
  Cyclic GFR-binding peptide
  MOD_RES (3)..(4): Xaa is C or S
KPXXAPTKLRSVKVAKV

SEQ ID NO: 8181 - protein, 19 aa, Artificial Sequence
  Cyclic GFR-binding peptide
  MOD_RES (5)..(6): Xaa is C or S
SASPXXVSQDLRPVQIRKI

SEQ ID NO: 8182 - protein, 19 aa, Artificial Sequence
  Cyclic GFR-binding peptide
PTELRSVKMAKVDENEKVV

SEQ ID NO: 8183 - protein, 15 aa, Artificial Sequence
  Cyclic GFR-binding peptide
  MOD_RES (2)..(2): Xaa is C or S
TXAPTKLSNITVQIM

SEQ ID NO: 8184 - protein, 19 aa, Artificial Sequence
  Cyclic GFR-binding peptide
SQDLEPLPIVYYIGKTPKI

SEQ ID NO: 8185 - protein, 20 aa, Artificial Sequence
  Cyclic GFR-binding peptide
  MOD_RES (6)..(7): Xaa is C or S
ASAAPXXVPQALRSVKIAKV

SEQ ID NO: 8186 - protein, 27 aa, Artificial Sequence
  Cyclic GFR-binding peptide
  MOD_RES (6)..(7): Xaa is C or S
YVPKPXXAPTKLSNITVQIMDDSSNVI

SEQ ID NO: 8187 - protein, 19 aa, Artificial Sequence
  Cyclic GFR-binding peptide
PQALSNITIQIMVGRKPKV

SEQ ID NO: 8188 - protein, 18 aa, Artificial Sequence
  Cyclic GFR-binding peptide
  MOD_RES (4)..(5): Xaa is C or S
PKPXXAPTKLEPLTVLYY

SEQ ID NO: 8189 - protein, 13 aa, Artificial Sequence
  Cyclic GFR-binding peptide
APTQLRPVQVRKI

SEQ ID NO: 8190 - protein, 13 aa, Artificial Sequence
  Cyclic GFR-binding peptide
APTKLSNITVQIM

SEQ ID NO: 8191 - protein, 27 aa, Artificial Sequence
  Cyclic GFR-binding peptide
  MOD_RES (6)..(7): Xaa is C or S
KIPKAXXVPTELRPVQMRKIDENEKVV

SEQ ID NO: 8192 - protein, 15 aa, Artificial Sequence
  Cyclic GFR-binding peptide
  MOD_RES (1)..(2): Xaa is C or S
XXVPQALRPVQIRKI

SEQ ID NO: 8193 - protein, 14 aa, Artificial Sequence
  Cyclic GFR-binding peptide
  MOD_RES (1)..(1): Xaa is C or S
XVPTELRSVKMAKV

SEQ ID NO: 8194 - protein, 18 aa, Artificial Sequence
  Cyclic GFR-binding peptide
  MOD_RES (4)..(5): Xaa is C or S
PKAXXVPTELEPLPMVYY

SEQ ID NO: 8195 - protein, 29 aa, Artificial Sequence
  Cyclic GFR-binding peptide
  MOD_RES (7)..(7): Xaa is C or S
NDEGLEXVPTEERSVKMAKVRIKPHQGQH

SEQ ID NO: 8196 - protein, 18 aa, Artificial Sequence
  Cyclic GFR-binding peptide
TELEPLPMVYYDENEKVV

SEQ ID NO: 8197 - protein, 17 aa, Artificial Sequence
  Cyclic GFR-binding peptide
DLRPVQIRKIIGKTPKI

SEQ ID NO: 8198 - protein, 14 aa, Artificial Sequence
  Cyclic GFR-binding peptide
  MOD_RES (1)..(1): Xaa is C or S
XVPQALSNITIQIM

SEQ ID NO: 8199 - protein, 18 aa, Artificial Sequence
  Cyclic GFR-binding peptide
  MOD_RES (4)..(5): Xaa is C or S
ASPXXVSQDLEPLPIVYY

SEQ ID NO: 8200 - protein, 20 aa, Artificial Sequence
  Cyclic GFR-binding peptide
  MOD_RES (6)..(7): Xaa is C or S
YVPKPXXAPTKLSNITVQIM

SEQ ID NO: 8201 - protein, 17 aa, Artificial Sequence
  Cyclic GFR-binding peptide
ELEPLTMLYYDENEKVV

SEQ ID NO: 8202 - protein, 18 aa, Artificial Sequence
  Cyclic GFR-binding peptide
  MOD_RES (4)..(5): Xaa is C or S
ASPXXVPQDLRPVQIRKI

SEQ ID NO: 8203 - protein, 17 aa, Artificial Sequence
  Cyclic GFR-binding peptide
DLRSVKIAKVIGKTPKI

SEQ ID NO: 8204 - protein, 17 aa, Artificial Sequence
  Cyclic GFR-binding peptide
  MOD_RES (2)..(2): Xaa is C or S
QXRPTQVQLEPLTVLYY

SEQ ID NO: 8205 - protein, 18 aa, Artificial Sequence
  Cyclic GFR-binding peptide
  MOD_RES (3)..(3): Xaa is C or S
VQXRPTQVQLEPLTVLYY

SEQ ID NO: 8206 - protein, 16 aa, Artificial Sequence
  Cyclic GFR-binding peptide
LSNITIQIMVGRKPKV

SEQ ID NO: 8207 - protein, 16 aa, Artificial Sequence
  Cyclic GFR-binding peptide
  MOD_RES (1)..(1): Xaa is C or S
XRPTQVQLSNITVQIM

SEQ ID NO: 8208 - protein, 18 aa, Artificial Sequence
  Cyclic GFR-binding peptide
TKLSNITVQIMDDSSNVI

SEQ ID NO: 8209 - protein, 16 aa, Artificial Sequence
  Cyclic GFR-binding peptide
  MOD_RES (2)..(3): Xaa is C or S
PXXVSQDLSNITIQIM

SEQ ID NO: 8210 - protein, 20 aa, Artificial Sequence
  Cyclic GFR-binding peptide
  MOD_RES (5)..(5): Xaa is C or S
RNVQXRPTQVQLEPLTVLYY

SEQ ID NO: 8211 - protein, 16 aa, Artificial Sequence
  Cyclic GFR-binding peptide
LRSVKIAKVVGRTPKV

SEQ ID NO: 8212 - protein, 18 aa, Artificial Sequence
  Cyclic GFR-binding peptide
  MOD_RES (4)..(5): Xaa is C or S
AAPXXVPQALRPVQIRKI

SEQ ID NO: 8213 - protein, 13 aa, Artificial Sequence
  Cyclic GFR-binding peptide
VPQALEPLTILYY

SEQ ID NO: 8214 - protein, 20 aa, Artificial Sequence
  Cyclic GFR-binding peptide
VHHRPVQVRKIEYVRKKPKL

SEQ ID NO: 8215 - protein, 17 aa, Artificial Sequence
  Cyclic GFR-binding peptide
EPLTMLYYRIKPHQGQH

SEQ ID NO: 8216 - protein, 14 aa, Artificial Sequence
  Cyclic GFR-binding peptide
  MOD_RES (1)..(1): Xaa is C or S
XAPTQLSNITVQIM

SEQ ID NO: 8217 - protein, 18 aa, Artificial Sequence
  Cyclic GFR-binding peptide
TQLSNITVQIMDDSSNVI

SEQ ID NO: 8218 - protein, 27 aa, Artificial Sequence
  Cyclic GFR-binding peptide
  MOD_RES (6)..(7): Xaa is C or S
ASASPXXVPQDLSNITIQIMVGRTPKV

SEQ ID NO: 8219 - protein, 15 aa, Artificial Sequence
  Cyclic GFR-binding peptide
EPLPIVYYVGRTPKV

SEQ ID NO: 8220 - protein, 19 aa, Artificial Sequence
  Cyclic GFR-binding peptide
  MOD_RES (5)..(6): Xaa is C or S
SASPXXVPQDLSNITIQIM

SEQ ID NO: 8221 - protein, 16 aa, Artificial Sequence
  Cyclic GFR-binding peptide
LRPVQIRKIVGRTPKV

SEQ ID NO: 8222 - protein, 13 aa, Artificial Sequence
  Cyclic GFR-binding peptide
APTQLEPLTVLYY

SEQ ID NO: 8223 - protein, 15 aa, Artificial Sequence
  Cyclic GFR-binding peptide
EPLPMVYYDEYDKVV

SEQ ID NO: 8224 - protein, 17 aa, Artificial Sequence
  Cyclic GFR-binding peptide
  MOD_RES (3)..(4): Xaa is C or S
APXXVPQALRSVKIAKV

SEQ ID NO: 8225 - protein, 20 aa, Artificial Sequence
  Cyclic GFR-binding peptide
  MOD_RES (5)..(5): Xaa is C or S
SSVKXQPSRVHHRPVQVRKI

SEQ ID NO: 8226 - protein, 13 aa, Artificial Sequence
  Cyclic GFR-binding peptide
SRVHHEPLTVLYY

SEQ ID NO: 8227 - protein, 20 aa, Artificial Sequence
  Cyclic GFR-binding peptide
TEERPVQMRKIRIKPHQGQH

SEQ ID NO: 8228 - protein, 16 aa, Artificial Sequence
  Cyclic GFR-binding peptide
  MOD_RES (2)..(3): Xaa is C or S
AXXVPTELSNITMQIM

SEQ ID NO: 8229 - protein, 19 aa, Artificial Sequence
  Cyclic GFR-binding peptide
  MOD_RES (5)..(6): Xaa is C or S
VPKPXXAPTQLSNITVQIM

SEQ ID NO: 8230 - protein, 17 aa, Artificial Sequence
  Cyclic GFR-binding peptide
ALRPVQIRKIVGRKPKV

SEQ ID NO: 8231 - protein, 18 aa, Artificial Sequence
  Cyclic GFR-binding peptide
  MOD_RES (4)..(5): Xaa is C or S
PKPXXAPTKLEPLPVVYY

SEQ ID NO: 8232 - protein, 19 aa, Artificial Sequence
  Cyclic GFR-binding peptide
QLSNITVQIMEIVRKKPIF

SEQ ID NO: 8233 - protein, 27 aa, Artificial Sequence
  Cyclic GFR-binding peptide
  MOD_RES (6)..(7): Xaa is C or S
ASASPXXVPQDLRPVQIRKIVGRTPKV

SEQ ID NO: 8234 - protein, 19 aa, Artificial Sequence
  Cyclic GFR-binding peptide
PTQLRSVKVAKVDDSSNVI

SEQ ID NO: 8235 - protein, 17 aa, Artificial Sequence
  Cyclic GFR-binding peptide
  MOD_RES (3)..(4): Xaa is C or S
SPXXVPQDLRSVKIAKV

SEQ ID NO: 8236 - protein, 17 aa, Artificial Sequence
  Cyclic GFR-binding peptide
  MOD_RES (3)..(4): Xaa is C or S
KAXXVPTELRSVKMAKV

SEQ ID NO: 8237 - protein, 20 aa, Artificial Sequence
  Cyclic GFR-binding peptide
  MOD_RES (6)..(7): Xaa is C or S
TVPKPXXAPTQLRPVQVRKI

SEQ ID NO: 8238 - protein, 16 aa, Artificial Sequence
  Cyclic GFR-binding peptide
  MOD_RES (2)..(3): Xaa is C or S
PXXAPTKLSNITVQIM

SEQ ID NO: 8239 - protein, 19 aa, Artificial Sequence
  Cyclic GFR-binding peptide
PTELEPLPMVYYDEYDKVV

SEQ ID NO: 8240 - protein, 15 aa, Artificial Sequence
  Cyclic GFR-binding peptide
EPLTVLYYDDSSNVI

SEQ ID NO: 8241 - protein, 19 aa, Artificial Sequence
  Cyclic GFR-binding peptide
  MOD_RES (5)..(6): Xaa is C or S
VPKPXXAPTQLRPVQVRKI

SEQ ID NO: 8242 - protein, 20 aa, Artificial Sequence
  Cyclic GFR-binding peptide
  MOD_RES (5)..(5): Xaa is C or S
SSVKXQPSRVHHEPLTVLYY

SEQ ID NO: 8243 - protein, 27 aa, Artificial Sequence
  Cyclic GFR-binding peptide
  MOD_RES (6)..(7): Xaa is C or S
ASASPXXVSQDLEPLPIVYYIGKTPKI

SEQ ID NO: 8244 - protein, 19 aa, Artificial Sequence
  Cyclic GFR-binding peptide
  MOD_RES (4)..(4): Xaa is C or S
NVQXRPTQVQLRSVKVAKV

SEQ ID NO: 8245 - protein, 16 aa, Artificial Sequence
  Cyclic GFR-binding peptide
  MOD_RES (2)..(3): Xaa is C or S
PXXVPQALEPLTILYY

SEQ ID NO: 8246 - protein, 15 aa, Artificial Sequence
  Cyclic GFR-binding peptide
  MOD_RES (1)..(2): Xaa is C or S
XXAPTQLSNITVQIM

SEQ ID NO: 8247 - protein, 16 aa, Artificial Sequence
  Cyclic GFR-binding peptide
LRPVQIRKIVGRKPKV

SEQ ID NO: 8248 - protein, 16 aa, Artificial Sequence
  Cyclic GFR-binding peptide
LSNITIQIMVGRTPKV

SEQ ID NO: 8249 - protein, 16 aa, Artificial Sequence
  Cyclic GFR-binding peptide
  MOD_RES (2)..(3): Xaa is C or S
PXXVSQDLRPVQIRKI

SEQ ID NO: 8250 - protein, 19 aa, Artificial Sequence
  Cyclic GFR-binding peptide
  MOD_RES (6)..(6): Xaa is C or S
VTKPTXAPTKLRSVKVAKV

SEQ ID NO: 8251 - protein, 18 aa, Artificial Sequence
  Cyclic GFR-binding peptide
  MOD_RES (4)..(5): Xaa is C or S
AAPXXVPQALSNITIQIM

SEQ ID NO: 8252 - protein, 18 aa, Artificial Sequence
  Cyclic GFR-binding peptide
TKLRSVKVAKVDDSSNVI

SEQ ID NO: 8253 - protein, 18 aa, Artificial Sequence
  Cyclic GFR-binding peptide
TQLRSVKVAKVDDSSNVI

SEQ ID NO: 8254 - protein, 13 aa, Artificial Sequence
  Cyclic GFR-binding peptide
VSQDLSNITIQIM

SEQ ID NO: 8255 - protein, 27 aa, Artificial Sequence
  Cyclic GFR-binding peptide
  MOD_RES (7)..(7): Xaa is C or S
HVTKPTXAPTKLRSVKVAKVDDSSNVI

SEQ ID NO: 8256 - protein, 19 aa, Artificial Sequence
  Cyclic GFR-binding peptide
PTKLRSVKVAKVDDSSNVI

SEQ ID NO: 8257 - protein, 18 aa, Artificial Sequence
  Cyclic GFR-binding peptide
  MOD_RES (3)..(3): Xaa is C or S
VQXRPTQVQLEPLPVVYY

SEQ ID NO: 8258 - protein, 18 aa, Artificial Sequence
  Cyclic GFR-binding peptide
  MOD_RES (4)..(5): Xaa is C or S
ASPXXVSQDLRSVKIAKV

SEQ ID NO: 8259 - protein, 19 aa, Artificial Sequence
  Cyclic GFR-binding peptide
  MOD_RES (4)..(4): Xaa is C or S
SVKXQPSRVHHEPLPVVYY

SEQ ID NO: 8260 - protein, 18 aa, Artificial Sequence
  Cyclic GFR-binding peptide
TQLRPVQVRKIDDSSNVI

SEQ ID NO: 8261 - protein, 18 aa, Artificial Sequence
  Cyclic GFR-binding peptide
TKLRPVQVRKIDDSSNVI

SEQ ID NO: 8262 - protein, 29 aa, Artificial Sequence
  Cyclic GFR-binding peptide
  MOD_RES (7)..(7): Xaa is C or S
NDEGLEXVPTEEEPLPMVYYRIKPHQGQH

SEQ ID NO: 8263 - protein, 15 aa, Artificial Sequence
  Cyclic GFR-binding peptide
RPVQMRKIDENEKVV

SEQ ID NO: 8264 - protein, 18 aa, Artificial Sequence
  Cyclic GFR-binding peptide
  MOD_RES (4)..(5): Xaa is C or S
PKAXXVPTELEPLTMLYY

SEQ ID NO: 8265 - protein, 20 aa, Artificial Sequence
  Cyclic GFR-binding peptide
VQLRSVKVAKVEIVRKKPIF

SEQ ID NO: 8266 - protein, 19 aa, Artificial Sequence
  Cyclic GFR-binding peptide
PQDLRSVKIAKVVGRTPKV

SEQ ID NO: 8267 - protein, 19 aa, Artificial Sequence
  Cyclic GFR-binding peptide
PTKLRPVQVRKIDDSSNVI

SEQ ID NO: 8268 - protein, 29 aa, Artificial Sequence
  Cyclic GFR-binding peptide
  MOD_RES (7)..(7): Xaa is C or S
NDEGLEXVPTEERPVQMRKIRIKPHQGQH

SEQ ID NO: 8269 - protein, 14 aa, Artificial Sequence
  Cyclic GFR-binding peptide
  MOD_RES (1)..(1): Xaa is C or S
XAPTKLRSVKVAKV

SEQ ID NO: 8270 - protein, 18 aa, Artificial Sequence
  Cyclic GFR-binding peptide
  MOD_RES (4)..(5): Xaa is C or S
ASPXXVPQDLSNITIQIM

SEQ ID NO: 8271 - protein, 18 aa, Artificial Sequence
  Cyclic GFR-binding peptide
  MOD_RES (4)..(5): Xaa is C or S
PKPXXAPTKLRPVQVRKI

SEQ ID NO: 8272 - protein, 19 aa, Artificial Sequence
  Cyclic GFR-binding peptide
PTQLRPVQVRKIDDSSNVI

SEQ ID NO: 8273 - protein, 27 aa, Artificial Sequence
  Cyclic GFR-binding peptide
  MOD_RES (7)..(7): Xaa is C or S
HVTKPTXAPTKLRPVQVRKIDDSSNVI

SEQ ID NO: 8274 - protein, 19 aa, Artificial Sequence
  Cyclic GFR-binding peptide
PQDLRPVQIRKIVGRTPKV

SEQ ID NO: 8275 - protein, 16 aa, Artificial Sequence
  Cyclic GFR-binding peptide
  MOD_RES (3)..(3): Xaa is C or S
PTXAPTKLSNITVQIM

SEQ ID NO: 8276 - protein, 16 aa, Artificial Sequence
  Cyclic GFR-binding peptide
LEPLTMLYYDENEKVV

SEQ ID NO: 8277 - protein, 16 aa, Artificial Sequence
  Cyclic GFR-binding peptide
LSNITMQIMDEYDKVV

SEQ ID NO: 8278 - protein, 18 aa, Artificial Sequence
  Cyclic GFR-binding peptide
EEPLTMLYYRIKPHQGQH

SEQ ID NO: 8279 - protein, 20 aa, Artificial Sequence
  Cyclic GFR-binding peptide
  MOD_RES (6)..(7): Xaa is C or S
ASASPXXVPQDLEPLPIVYY

SEQ ID NO: 8280 - protein, 19 aa, Artificial Sequence
  Cyclic GFR-binding peptide
  MOD_RES (5)..(6): Xaa is C or S
IPKAXXVPTELSNITMQIM

SEQ ID NO: 8281 - protein, 17 aa, Artificial Sequence
  Cyclic GFR-binding peptide
  MOD_RES (3)..(4): Xaa is C or S
KPXXAPTKLEPLPVVYY

SEQ ID NO: 8282 - protein, 27 aa, Artificial Sequence
  Cyclic GFR-binding peptide
  MOD_RES (7)..(7): Xaa is C or S
HVTKPTXAPTKLSNITVQIMDDSSNVI

SEQ ID NO: 8283 - protein, 13 aa, Artificial Sequence
  Cyclic GFR-binding peptide
VPQALRPVQIRKI

SEQ ID NO: 8284 - protein, 16 aa, Artificial Sequence
  Cyclic GFR-binding peptide
LRSVKMAKVDEYDKVV

SEQ ID NO: 8285 - protein, 18 aa, Artificial Sequence
  Cyclic GFR-binding peptide
ERSVKMAKVRIKPHQGQH

SEQ ID NO: 8286 - protein, 17 aa, Artificial Sequence
  Cyclic GFR-binding peptide
ELRSVKMAKVDEYDKVV

SEQ ID NO: 8287 - protein, 27 aa, Artificial Sequence
  Cyclic GFR-binding peptide
  MOD_RES (6)..(7): Xaa is C or S
SIPKAXXVPTELRPVQMRKIDEYDKVV

SEQ ID NO: 8288 - protein, 19 aa, Artificial Sequence
  Cyclic GFR-binding peptide
  MOD_RES (5)..(6): Xaa is C or S
VPKPXXAPTKLSNITVQIM

SEQ ID NO: 8289 - protein, 16 aa, Artificial Sequence
  Cyclic GFR-binding peptide
  MOD_RES (2)..(3): Xaa is C or S
PXXVPQALSNITIQIM

SEQ ID NO: 8290 - protein, 18 aa, Artificial Sequence
  Cyclic GFR-binding peptide
  MOD_RES (4)..(5): Xaa is C or S
PKPXXAPTQLRSVKVAKV

SEQ ID NO: 8291 - protein, 19 aa, Artificial Sequence
  Cyclic GFR-binding peptide
PTKLSNITVQIMDDSSNVI

SEQ ID NO: 8292 - protein, 27 aa, Artificial Sequence
  Cyclic GFR-binding peptide
  MOD_RES (6)..(7): Xaa is C or S
TVPKPXXAPTQLRPVQVRKIDDSSNVI

SEQ ID NO: 8293 - protein, 16 aa, Artificial Sequence
  Cyclic GFR-binding peptide
  MOD_RES (2)..(3): Xaa is C or S
PXXVPQDLSNITIQIM

SEQ ID NO: 8294 - protein, 14 aa, Artificial Sequence
  Cyclic GFR-binding peptide
PSRVHHEPLPVVYY

SEQ ID NO: 8295 - protein, 17 aa, Artificial Sequence
  Cyclic GFR-binding peptide
ELRPVQMRKIDEYDKVV

SEQ ID NO: 8296 - protein, 17 aa, Artificial Sequence
  Cyclic GFR-binding peptide
  MOD_RES (4)..(4): Xaa is C or S
KPTXAPTKLSNITVQIM

SEQ ID NO: 8297 - protein, 19 aa, Artificial Sequence
  Cyclic GFR-binding peptide
PTQLSNITVQIMDDSSNVI

SEQ ID NO: 8298 - protein, 20 aa, Artificial Sequence
  Cyclic GFR-binding peptide
  MOD_RES (6)..(7): Xaa is C or S
ASASPXXVSQDLSNITIQIM

SEQ ID NO: 8299 - protein, 27 aa, Artificial Sequence
  Cyclic GFR-binding peptide
  MOD_RES (6)..(7): Xaa is C or S
SIPKAXXVPTELRSVKMAKVDEYDKVV

SEQ ID NO: 8300 - protein, 20 aa, Artificial Sequence
  Cyclic GFR-binding peptide
  MOD_RES (7)..(7): Xaa is C or S
HVTKPTXAPTKLRPVQVRKI

SEQ ID NO: 8301 - protein, 29 aa, Artificial Sequence
  Cyclic GFR-binding peptide
  MOD_RES (5)..(5): Xaa is C or S
RNVQXRPTQVQLEPLTVLYYEIVRKKPIF

SEQ ID NO: 8302 - protein, 18 aa, Artificial Sequence
  Cyclic GFR-binding peptide
  MOD_RES (5)..(5): Xaa is C or S
EGLEXVPTEERSVKMAKV

SEQ ID NO: 8303 - protein, 16 aa, Artificial Sequence
  Cyclic GFR-binding peptide
  MOD_RES (2)..(3): Xaa is C or S
PXXAPTQLRPVQVRKI

SEQ ID NO: 8304 - protein, 16 aa, Artificial Sequence
  Cyclic GFR-binding peptide
LRPVQMRKIDEYDKVV

SEQ ID NO: 8305 - protein, 15 aa, Artificial Sequence
  Cyclic GFR-binding peptide
  MOD_RES (1)..(2): Xaa is C or S
XXVSQDLSNITIQIM

SEQ ID NO: 8306 - protein, 15 aa, Artificial Sequence
  Cyclic GFR-binding peptide
SNITIQIMVGRTPKV

SEQ ID NO: 8307 - protein, 16 aa, Artificial Sequence
  Cyclic GFR-binding peptide
  MOD_RES (3)..(3): Xaa is C or S
LEXVPTEEEPLPMVYY

SEQ ID NO: 8308 - protein, 16 aa, Artificial Sequence
  Cyclic GFR-binding peptide
LRSVKIAKVVGRKPKV

SEQ ID NO: 8309 - protein, 15 aa, Artificial Sequence
  Cyclic GFR-binding peptide
SNITMQIMDENEKVV

SEQ ID NO: 8310 - protein, 17 aa, Artificial Sequence
  Cyclic GFR-binding peptide
  MOD_RES (2)..(2): Xaa is C or S
QXRPTQVQLEPLPVVYY

SEQ ID NO: 8311 - protein, 17 aa, Artificial Sequence
  Cyclic GFR-binding peptide
DLSNITIQIMIGKTPKI

SEQ ID NO: 8312 - protein, 15 aa, Artificial Sequence
  Cyclic GFR-binding peptide
  MOD_RES (2)..(2): Xaa is C or S
TXAPTKLRPVQVRKI

SEQ ID NO: 8313 - protein, 20 aa, Artificial Sequence
  Cyclic GFR-binding peptide
VHHEPLPVVYYEYVRKKPKL

SEQ ID NO: 8314 - protein, 19 aa, Artificial Sequence
  Cyclic GFR-binding peptide
QLRSVKVAKVEIVRKKPIF

SEQ ID NO: 8315 - protein, 14 aa, Artificial Sequence
  Cyclic GFR-binding peptide
  MOD_RES (1)..(1): Xaa is C or S
XVPQDLRSVKIAKV

SEQ ID NO: 8316 - protein, 18 aa, Artificial Sequence
  Cyclic GFR-binding peptide
LEPLPVVYYEIVRKKPIF

SEQ ID NO: 8317 - protein, 27 aa, Artificial Sequence
  Cyclic GFR-binding peptide
  MOD_RES (6)..(7): Xaa is C or S
TVPKPXXAPTQLRSVKVAKVDDSSNVI

SEQ ID NO: 8318 - protein, 17 aa, Artificial Sequence
  Cyclic GFR-binding peptide
EPLPVVYYEIVRKKPIF

SEQ ID NO: 8319 - protein, 29 aa, Artificial Sequence
  Cyclic GFR-binding peptide
  MOD_RES (5)..(5): Xaa is C or S
SSVKXQPSRVHHEPLPVVYYEYVRKKPKL

SEQ ID NO: 8320 - protein, 13 aa, Artificial Sequence
  Cyclic GFR-binding peptide
VPQALSNITIQIM

SEQ ID NO: 8321 - protein, 17 aa, Artificial Sequence
  Cyclic GFR-binding peptide
  MOD_RES (3)..(4): Xaa is C or S
KAXXVPTELEPLPMVYY

SEQ ID NO: 8322 - protein, 18 aa, Artificial Sequence
  Cyclic GFR-binding peptide
EEPLPMVYYRIKPHQGQH

SEQ ID NO: 8323 - protein, 18 aa, Artificial Sequence
  Cyclic GFR-binding peptide
  MOD_RES (3)..(3): Xaa is C or S
VQXRPTQVQLSNITVQIM

SEQ ID NO: 8324 - protein, 19 aa, Artificial Sequence
  Cyclic GFR-binding peptide
HHSNITVQIMEYVRKKPKL

SEQ ID NO: 8325 - protein, 14 aa, Artificial Sequence
  Cyclic GFR-binding peptide
PSRVHHRPVQVRKI

SEQ ID NO: 8326 - protein, 21 aa, Artificial Sequence
  Cyclic GFR-binding peptide
QVQLEPLPVVYYEIVRKKPIF

SEQ ID NO: 8327 - protein, 14 aa, Artificial Sequence
  Cyclic GFR-binding peptide
  MOD_RES (1)..(1): Xaa is C or S
XAPTQLRPVQVRKI

SEQ ID NO: 8328 - protein, 15 aa, Artificial Sequence
  Cyclic GFR-binding peptide
  MOD_RES (1)..(2): Xaa is C or S
XXAPTQLEPLPVVYY

SEQ ID NO: 8329 - protein, 20 aa, Artificial Sequence
  Cyclic GFR-binding peptide
VHHEPLTVLYYEYVRKKPKL

SEQ ID NO: 8330 - protein, 17 aa, Artificial Sequence
  Cyclic GFR-binding peptide
RPVQMRKIRIKPHQGQH

SEQ ID NO: 8331 - protein, 27 aa, Artificial Sequence
  Cyclic GFR-binding peptide
  MOD_RES (6)..(7): Xaa is C or S
YVPKPXXAPTKLEPLPVVYYDDSSNVI

SEQ ID NO: 8332 - protein, 19 aa, Artificial Sequence
  Cyclic GFR-binding peptide
  MOD_RES (5)..(6): Xaa is C or S
SAAPXXVPQALRPVQIRKI

SEQ ID NO: 8333 - protein, 15 aa, Artificial Sequence
  Cyclic GFR-binding peptide
RPVQMRKIDEYDKVV

SEQ ID NO: 8334 - protein, 17 aa, Artificial Sequence
  Cyclic GFR-binding peptide
  MOD_RES (3)..(4): Xaa is C or S
KPXXAPTKLEPLTVLYY

SEQ ID NO: 8335 - protein, 27 aa, Artificial Sequence
  Cyclic GFR-binding peptide
  MOD_RES (6)..(7): Xaa is C or S
ASAAPXXVPQALEPLTILYYVGRKPKV

SEQ ID NO: 8336 - protein, 16 aa, Artificial Sequence
  Cyclic GFR-binding peptide
LRSVKIAKVIGKTPKI

SEQ ID NO: 8337 - protein, 20 aa, Artificial Sequence
  Cyclic GFR-binding peptide
  MOD_RES (6)..(7): Xaa is C or S
ASAAPXXVPQALEPLTILYY

SEQ ID NO: 8338 - protein, 18 aa, Artificial Sequence
  Cyclic GFR-binding peptide
TELRPVQMRKIDENEKVV

SEQ ID NO: 8339 - protein, 18 aa, Artificial Sequence
  Cyclic GFR-binding peptide
  MOD_RES (5)..(5): Xaa is C or S
TKPTXAPTKLSNITVQIM

SEQ ID NO: 8340 - protein, 15 aa, Artificial Sequence
  Cyclic GFR-binding peptide
RPTQVQLSNITVQIM

SEQ ID NO: 8341 - protein, 14 aa, Artificial Sequence
  Cyclic GFR-binding peptide
  MOD_RES (1)..(1): Xaa is C or S
XVPQDLEPLPIVYY

SEQ ID NO: 8342 - protein, 20 aa, Artificial Sequence
  Cyclic GFR-binding peptide
  MOD_RES (5)..(5): Xaa is C or S
RNVQXRPTQVQLSNITVQIM

SEQ ID NO: 8343 - protein, 15 aa, Artificial Sequence
  Cyclic GFR-binding peptide
  MOD_RES (1)..(2): Xaa is C or S
XXVPQDLSNITIQIM

SEQ ID NO: 8344 - protein, 27 aa, Artificial Sequence
  Cyclic GFR-binding peptide
  MOD_RES (6)..(7): Xaa is C or S
TVPKPXXAPTQLEPLPVVYYDDSSNVI

SEQ ID NO: 8345 - protein, 13 aa, Artificial Sequence
  Cyclic GFR-binding peptide
APTKLRPVQVRKI

SEQ ID NO: 8346 - protein, 17 aa, Artificial Sequence
  Cyclic GFR-binding peptide
DLRSVKIAKVVGRTPKV

SEQ ID NO: 8347 - protein, 18 aa, Artificial Sequence
  Cyclic GFR-binding peptide
  MOD_RES (4)..(5): Xaa is C or S
PKPXXAPTQLEPLTVLYY

SEQ ID NO: 8348 - protein, 17 aa, Artificial Sequence
  Cyclic GFR-binding peptide
EPLPVVYYEYVRKKPKL

SEQ ID NO: 8349 - protein, 20 aa, Artificial Sequence
  Cyclic GFR-binding peptide
  MOD_RES (6)..(7): Xaa is C or S
TVPKPXXAPTQLEPLPVVYY

SEQ ID NO: 8350 - protein, 19 aa, Artificial Sequence
  Cyclic GFR-binding peptide
  MOD_RES (4)..(4): Xaa is C or S
SVKXQPSRVHHRPVQVRKI

SEQ ID NO: 8351 - protein, 13 aa, Artificial Sequence
  Cyclic GFR-binding peptide
APTQLSNITVQIM

SEQ ID NO: 8352 - protein, 16 aa, Artificial Sequence
  Cyclic GFR-binding peptide
  MOD_RES (2)..(3): Xaa is C or S
PXXAPTQLEPLPVVYY

SEQ ID NO: 8353 - protein, 18 aa, Artificial Sequence
  Cyclic GFR-binding peptide
LEPLTVLYYEIVRKKPIF

SEQ ID NO: 8354 - protein, 13 aa, Artificial Sequence
  Cyclic GFR-binding peptide
TQVQLEPLTVLYY

SEQ ID NO: 8355 - protein, 15 aa, Artificial Sequence
  Cyclic GFR-binding peptide
  MOD_RES (1)..(2): Xaa is C or S
XXVPTELRSVKMAKV

SEQ ID NO: 8356 - protein, 21 aa, Artificial Sequence
  Cyclic GFR-binding peptide
RVHHSNITVQIMEYVRKKPKL

SEQ ID NO: 8357 - protein, 20 aa, Artificial Sequence
  Cyclic GFR-binding peptide
TEERSVKMAKVRIKPHQGQH

SEQ ID NO: 8358 - protein, 20 aa, Artificial Sequence
  Cyclic GFR-binding peptide
  MOD_RES (6)..(7): Xaa is C or S
SIPKAXXVPTELRPVQMRKI

SEQ ID NO: 8359 - protein, 19 aa, Artificial Sequence
  Cyclic GFR-binding peptide
HHEPLPVVYYEYVRKKPKL

SEQ ID NO: 8360 - protein, 15 aa, Artificial Sequence
  Cyclic GFR-binding peptide
RSVKIAKVVGRTPKV

SEQ ID NO: 8361 - protein, 17 aa, Artificial Sequence
  Cyclic GFR-binding peptide
  MOD_RES (4)..(4): Xaa is C or S
KPTXAPTKLRPVQVRKI

SEQ ID NO: 8362 - protein, 19 aa, Artificial Sequence
  Cyclic GFR-binding peptide
PTELEPLPMVYYDENEKVV

SEQ ID NO: 8363 - protein, 17 aa, Artificial Sequence
  Cyclic GFR-binding peptide
SNITVQIMEYVRKKPKL

SEQ ID NO: 8364 - protein, 16 aa, Artificial Sequence
  Cyclic GFR-binding peptide
  MOD_RES (2)..(3): Xaa is C or S
AXXVPTELRPVQMRKI

SEQ ID NO: 8365 - protein, 17 aa, Artificial Sequence
  Cyclic GFR-binding peptide
  MOD_RES (2)..(2): Xaa is C or S
KXQPSRVHHSNITVQIM

SEQ ID NO: 8366 - protein, 17 aa, Artificial Sequence
  Cyclic GFR-binding peptide
ALEPLTILYYVGRKPKV

SEQ ID NO: 8367 - protein, 15 aa, Artificial Sequence
  Cyclic GFR-binding peptide
RSVKVAKVDDSSNVI

SEQ ID NO: 8368 - protein, 17 aa, Artificial Sequence
  Cyclic GFR-binding peptide
RSVKVAKVEIVRKKPIF

SEQ ID NO: 8369 - protein, 19 aa, Artificial Sequence
  Cyclic GFR-binding peptide
PTKLEPLTVLYYDDSSNVI

SEQ ID NO: 8370 - protein, 18 aa, Artificial Sequence
  Cyclic GFR-binding peptide
  MOD_RES (4)..(5): Xaa is C or S
AAPXXVPQALEPLTILYY

SEQ ID NO: 8371 - protein, 14 aa, Artificial Sequence
  Cyclic GFR-binding peptide
PTQVQLEPLTVLYY

SEQ ID NO: 8372 - protein, 15 aa, Artificial Sequence
  Cyclic GFR-binding peptide
  MOD_RES (1)..(2): Xaa is C or S
XXAPTKLRPVQVRKI

SEQ ID NO: 8373 - protein, 17 aa, Artificial Sequence
  Cyclic GFR-binding peptide
ALSNITIQIMVGRKPKV

SEQ ID NO: 8374 - protein, 19 aa, Artificial Sequence
  Cyclic GFR-binding peptide
PTQLEPLTVLYYDDSSNVI

SEQ ID NO: 8375 - protein, 21 aa, Artificial Sequence
  Cyclic GFR-binding peptide
RVHHEPLTVLYYEYVRKKPKL

SEQ ID NO: 8376 - protein, 19 aa, Artificial Sequence
  Cyclic GFR-binding peptide
  MOD_RES (5)..(6): Xaa is C or S
VPKPXXAPTQLEPLPVVYY

SEQ ID NO: 8377 - protein, 19 aa, Artificial Sequence
  Cyclic GFR-binding peptide
  MOD_RES (4)..(4): Xaa is C or S
NVQXRPTQVQLEPLPVVYY

SEQ ID NO: 8378 - protein, 13 aa, Artificial Sequence
  Cyclic GFR-binding peptide
TQVQLEPLPVVYY

SEQ ID NO: 8379 - protein, 15 aa, Artificial Sequence
  Cyclic GFR-binding peptide
  MOD_RES (1)..(2): Xaa is C or S
XXAPTQLEPLTVLYY

SEQ ID NO: 8380 - protein, 19 aa, Artificial Sequence
  Cyclic GFR-binding peptide
SQDLRPVQIRKIIGKTPKI

SEQ ID NO: 8381 - protein, 18 aa, Artificial Sequence
  Cyclic GFR-binding peptide
QALRPVQIRKIVGRKPKV

SEQ ID NO: 8382 - protein, 16 aa, Artificial Sequence
  Cyclic GFR-binding peptide
LSNITIQIMIGKTPKI

SEQ ID NO: 8383 - protein, 17 aa, Artificial Sequence
  Cyclic GFR-binding peptide
  MOD_RES (3)..(4): Xaa is C or S
KPXXAPTQLSNITVQIM

SEQ ID NO: 8384 - protein, 19 aa, Artificial Sequence
  Cyclic GFR-binding peptide
  MOD_RES (6)..(6): Xaa is C or S
VTKPTXAPTKLSNITVQIM

SEQ ID NO: 8385 - protein, 19 aa, Artificial Sequence
  Cyclic GFR-binding peptide
  MOD_RES (5)..(6): Xaa is C or S
VPKPXXAPTKLRSVKVAKV

SEQ ID NO: 8386 - protein, 27 aa, Artificial Sequence
  Cyclic GFR-binding peptide
  MOD_RES (6)..(7): Xaa is C or S
KIPKAXXVPTELEPLPMVYYDENEKVV

SEQ ID NO: 8387 - protein, 19 aa, Artificial Sequence
  Cyclic GFR-binding peptide
PQDLSNITIQIMVGRTPKV

SEQ ID NO: 8388 - protein, 20 aa, Artificial Sequence
  Cyclic GFR-binding peptide
  MOD_RES (6)..(7): Xaa is C or S
ASASPXXVSQDLRSVKIAKV

SEQ ID NO: 8389 - protein, 18 aa, Artificial Sequence
  Cyclic GFR-binding peptide
QDLEPLPIVYYIGKTPKI

SEQ ID NO: 8390 - protein, 14 aa, Artificial Sequence
  Cyclic GFR-binding peptide
  MOD_RES (1)..(1): Xaa is C or S
XVPQALRPVQIRKI

SEQ ID NO: 8391 - protein, 18 aa, Artificial Sequence
  Cyclic GFR-binding peptide
  MOD_RES (4)..(5): Xaa is C or S
PKAXXVPTELRPVQMRKI

SEQ ID NO: 8392 - protein, 20 aa, Artificial Sequence
  Cyclic GFR-binding peptide
TEEEPLTMLYYRIKPHQGQH

SEQ ID NO: 8393 - protein, 20 aa, Artificial Sequence
  Cyclic GFR-binding peptide
  MOD_RES (6)..(7): Xaa is C or S
KIPKAXXVPTELSNITMQIM

SEQ ID NO: 8394 - protein, 15 aa, Artificial Sequence
  Cyclic GFR-binding peptide
EPLTILYYVGRKPKV

SEQ ID NO: 8395 - protein, 18 aa, Artificial Sequence
  Cyclic GFR-binding peptide
  MOD_RES (4)..(5): Xaa is C or S
ASPXXVPQDLEPLPIVYY

SEQ ID NO: 8396 - protein, 21 aa, Artificial Sequence
  Cyclic GFR-binding peptide
QVQLRSVKVAKVEIVRKKPIF

SEQ ID NO: 8397 - protein, 20 aa, Artificial Sequence
  Cyclic GFR-binding peptide
VHHSNITVQIMEYVRKKPKL

SEQ ID NO: 8398 - protein, 18 aa, Artificial Sequence
  Cyclic GFR-binding peptide
  MOD_RES (4)..(5): Xaa is C or S
ASPXXVSQDLRPVQIRKI

SEQ ID NO: 8399 - protein, 18 aa, Artificial Sequence
  Cyclic GFR-binding peptide
LSNITVQIMEIVRKKPIF

SEQ ID NO: 8400 - protein, 15 aa, Artificial Sequence
  Cyclic GFR-binding peptide
  MOD_RES (1)..(2): Xaa is C or S
XXAPTKLSNITVQIM

SEQ ID NO: 8401 - protein, 20 aa, Artificial Sequence
  Cyclic GFR-binding peptide
  MOD_RES (6)..(7): Xaa is C or S
ASASPXXVSQDLRPVQIRKI

SEQ ID NO: 8402 - protein, 13 aa, Artificial Sequence
  Cyclic GFR-binding peptide
VPQDLSNITIQIM

SEQ ID NO: 8403 - protein, 20 aa, Artificial Sequence
  Cyclic GFR-binding peptide
  MOD_RES (5)..(5): Xaa is C or S
RNVQXRPTQVQLEPLPVVYY

SEQ ID NO: 8404 - protein, 19 aa, Artificial Sequence
  Cyclic GFR-binding peptide
  MOD_RES (5)..(6): Xaa is C or S
VPKPXXAPTKLRPVQVRKI

SEQ ID NO: 8405 - protein, 17 aa, Artificial Sequence
  Cyclic GFR-binding peptide
ALRSVKIAKVVGRKPKV

SEQ ID NO: 8406 - protein, 15 aa, Artificial Sequence
  Cyclic GFR-binding peptide
SNITVQIMDDSSNVI

SEQ ID NO: 8407 - protein, 17 aa, Artificial Sequence
  Cyclic GFR-binding peptide
  MOD_RES (4)..(4): Xaa is C or S
KPTXAPTKLRSVKVAKV

SEQ ID NO: 8408 - protein, 20 aa, Artificial Sequence
  Cyclic GFR-binding peptide
  MOD_RES (6)..(7): Xaa is C or S
TVPKPXXAPTQLRSVKVAKV

SEQ ID NO: 8409 - protein, 19 aa, Artificial Sequence
  Cyclic GFR-binding peptide
PQDLEPLPIVYYVGRTPKV

SEQ ID NO: 8410 - protein, 18 aa, Artificial Sequence
  Cyclic GFR-binding peptide
  MOD_RES (4)..(5): Xaa is C or S
ASPXXVPQDLRSVKIAKV

SEQ ID NO: 8411 - protein, 20 aa, Artificial Sequence
  Cyclic GFR-binding peptide
  MOD_RES (6)..(7): Xaa is C or S
KIPKAXXVPTELRPVQMRKI

SEQ ID NO: 8412 - protein, 16 aa, Artificial Sequence
  Cyclic GFR-binding peptide
  MOD_RES (3)..(3): Xaa is C or S
LEXVPTEEEPLTMLYY

SEQ ID NO: 8413 - protein, 18 aa, Artificial Sequence
  Cyclic GFR-binding peptide
  MOD_RES (4)..(5): Xaa is C or S
ASPXXVSQDLSNITIQIM

SEQ ID NO: 8414 - protein, 18 aa, Artificial Sequence
  Cyclic GFR-binding peptide
  MOD_RES (5)..(5): Xaa is C or S
TKPTXAPTKLEPLPVVYY

SEQ ID NO: 8415 - protein, 14 aa, Artificial Sequence
  Cyclic GFR-binding peptide
  MOD_RES (1)..(1): Xaa is C or S
XAPTQLRSVKVAKV

SEQ ID NO: 8416 - protein, 15 aa, Artificial Sequence
  Cyclic GFR-binding peptide
  MOD_RES (1)..(2): Xaa is C or S
XXVPQALSNITIQIM

SEQ ID NO: 8417 - protein, 16 aa, Artificial Sequence
  Cyclic GFR-binding peptide
LEPLPMVYYDEYDKVV

SEQ ID NO: 8418 - protein, 14 aa, Artificial Sequence
  Cyclic GFR-binding peptide
  MOD_RES (1)..(1): Xaa is C or S
XVPQDLRPVQIRKI

SEQ ID NO: 8419 - protein, 15 aa, Artificial Sequence
  Cyclic GFR-binding peptide
  MOD_RES (1)..(2): Xaa is C or S
XXVPQALEPLTILYY

SEQ ID NO: 8420 - protein, 18 aa, Artificial Sequence
  Cyclic GFR-binding peptide
  MOD_RES (4)..(5): Xaa is C or S
PKPXXAPTKLSNITVQIM

SEQ ID NO: 8421 - protein, 15 aa, Artificial Sequence
  Cyclic GFR-binding peptide
RPTQVQLEPLPVVYY

SEQ ID NO: 8422 - protein, 15 aa, Artificial Sequence
  Cyclic GFR-binding peptide
EPLPVVYYDDSSNVI

SEQ ID NO: 8423 - protein, 13 aa, Artificial Sequence
  Cyclic GFR-binding peptide
APTKLEPLTVLYY

SEQ ID NO: 8424 - protein, 18 aa, Artificial Sequence
  Cyclic GFR-binding peptide
  MOD_RES (4)..(5): Xaa is C or S
PKAXXVPTELRSVKMAKV

SEQ ID NO: 8425 - protein, 20 aa, Artificial Sequence
  Cyclic GFR-binding peptide
  MOD_RES (6)..(7): Xaa is C or S
KIPKAXXVPTELEPLPMVYY

SEQ ID NO: 8426 - protein, 14 aa, Artificial Sequence
  Cyclic GFR-binding peptide
  MOD_RES (1)..(1): Xaa is C or S
XVPQALEPLTILYY

SEQ ID NO: 8427 - protein, 19 aa, Artificial Sequence
  Cyclic GFR-binding peptide
  MOD_RES (5)..(6): Xaa is C or S
SAAPXXVPQALRSVKIAKV

SEQ ID NO: 8428 - protein, 16 aa, Artificial Sequence
  Cyclic GFR-binding peptide
  MOD_RES (1)..(1): Xaa is C or S
XRPTQVQLEPLTVLYY

SEQ ID NO: 8429 - protein, 27 aa, Artificial Sequence
  Cyclic GFR-binding peptide
  MOD_RES (7)..(7): Xaa is C or S
HVTKPTXAPTKLEPLTVLYYDDSSNVI

SEQ ID NO: 8430 - protein, 14 aa, Artificial Sequence
  Cyclic GFR-binding peptide
  MOD_RES (1)..(1): Xaa is C or S
XVSQDLSNITIQIM

SEQ ID NO: 8431 - protein, 17 aa, Artificial Sequence
  Cyclic GFR-binding peptide
  MOD_RES (3)..(4): Xaa is C or S
KAXXVPTELRPVQMRKI

SEQ ID NO: 8432 - protein, 15 aa, Artificial Sequence
  Cyclic GFR-binding peptide
  MOD_RES (2)..(2): Xaa is C or S
EXVPTEEEPLPMVYY

SEQ ID NO: 8433 - protein, 21 aa, Artificial Sequence
  Cyclic GFR-binding peptide
PTEEEPLPMVYYRIKPHQGQH

SEQ ID NO: 8434 - protein, 18 aa, Artificial Sequence
  Cyclic GFR-binding peptide
  MOD_RES (4)..(5): Xaa is C or S
PKPXXAPTQLRPVQVRKI

SEQ ID NO: 8435 - protein, 17 aa, Artificial Sequence
  Cyclic GFR-binding peptide
  MOD_RES (2)..(2): Xaa is C or S
KXQPSRVHHEPLTVLYY

SEQ ID NO: 8436 - protein, 17 aa, Artificial Sequence
  Cyclic GFR-binding peptide
ELRSVKMAKVDENEKVV

SEQ ID NO: 8437 - protein, 18 aa, Artificial Sequence
  Cyclic GFR-binding peptide
QDLRPVQIRKIVGRTPKV

SEQ ID NO: 8438 - protein, 17 aa, Artificial Sequence
  Cyclic GFR-binding peptide
EPLTVLYYEIVRKKPIF

SEQ ID NO: 8439 - protein, 15 aa, Artificial Sequence
  Cyclic GFR-binding peptide
  MOD_RES (1)..(2): Xaa is C or S
XXAPTQLRPVQVRKI

SEQ ID NO: 8440 - protein, 21 aa, Artificial Sequence
  Cyclic GFR-binding peptide
QVQLEPLTVLYYEIVRKKPIF

SEQ ID NO: 8441 - protein, 19 aa, Artificial Sequence
  Cyclic GFR-binding peptide
PQALRSVKIAKVVGRKPKV

SEQ ID NO: 8442 - protein, 16 aa, Artificial Sequence
  Cyclic GFR-binding peptide
LEPLPIVYYIGKTPKI

SEQ ID NO: 8443 - protein, 17 aa, Artificial Sequence
  Cyclic GFR-binding peptide
  MOD_RES (2)..(2): Xaa is C or S
QXRPTQVQLRSVKVAKV

SEQ ID NO: 8444 - protein, 13 aa, Artificial Sequence
  Cyclic GFR-binding peptide
VPTELRSVKMAKV

SEQ ID NO: 8445 - protein, 27 aa, Artificial Sequence
  Cyclic GFR-binding peptide
  MOD_RES (6)..(7): Xaa is C or S
KIPKAXXVPTELSNITMQIMDENEKVV

SEQ ID NO: 8446 - protein, 17 aa, Artificial Sequence
  Cyclic GFR-binding peptide
  MOD_RES (3)..(4): Xaa is C or S
KPXXAPTKLSNITVQIM

SEQ ID NO: 8447 - protein, 15 aa, Artificial Sequence
  Cyclic GFR-binding peptide
  MOD_RES (1)..(2): Xaa is C or S
XXAPTKLEPLTVLYY

SEQ ID NO: 8448 - protein, 20 aa, Artificial Sequence
  Cyclic GFR-binding peptide
TEEEPLPMVYYRIKPHQGQH

SEQ ID NO: 8449 - protein, 20 aa, Artificial Sequence
  Cyclic GFR-binding peptide
  MOD_RES (7)..(7): Xaa is C or S
HVTKPTXAPTKLEPLTVLYY

SEQ ID NO: 8450 - protein, 18 aa, Artificial Sequence
  Cyclic GFR-binding peptide
TKLEPLPVVYYDDSSNVI

SEQ ID NO: 8451 - protein, 14 aa, Artificial Sequence
  Cyclic GFR-binding peptide
  MOD_RES (1)..(1): Xaa is C or S
XAPTKLEPLPVVYY

SEQ ID NO: 8452 - protein, 19 aa, Artificial Sequence
  Cyclic GFR-binding peptide
  MOD_RES (4)..(4): Xaa is C or S
SVKXQPSRVHHEPLTVLYY

SEQ ID NO: 8453 - protein, 18 aa, Artificial Sequence
  Cyclic GFR-binding peptide
TELEPLTMLYYDEYDKVV

SEQ ID NO: 8454 - protein, 19 aa, Artificial Sequence
  Cyclic GFR-binding peptide
PTELSNITMQIMDENEKVV

SEQ ID NO: 8455 - protein, 20 aa, Artificial Sequence
  Cyclic GFR-binding peptide
  MOD_RES (6)..(7): Xaa is C or S
SIPKAXXVPTELRSVKMAKV

SEQ ID NO: 8456 - protein, 19 aa, Artificial Sequence
  Cyclic GFR-binding peptide
  MOD_RES (4)..(4): Xaa is C or S
SVKXQPSRVHHSNITVQIM

SEQ ID NO: 8457 - protein, 18 aa, Artificial Sequence
  Cyclic GFR-binding peptide
  MOD_RES (4)..(5): Xaa is C or S
PKPXXAPTQLEPLPVVYY

SEQ ID NO: 8458 - protein, 15 aa, Artificial Sequence
  Cyclic GFR-binding peptide
RPVQIRKIIGKTPKI

SEQ ID NO: 8459 - protein, 27 aa, Artificial Sequence
  Cyclic GFR-binding peptide
  MOD_RES (6)..(7): Xaa is C or S
YVPKPXXAPTKLRSVKVAKVDDSSNVI

SEQ ID NO: 8460 - protein, 16 aa, Artificial Sequence
  Cyclic GFR-binding peptide
LEPLTVLYYDDSSNVI

SEQ ID NO: 8461 - protein, 16 aa, Artificial Sequence
  Cyclic GFR-binding peptide
  MOD_RES (2)..(3): Xaa is C or S
PXXAPTQLEPLTVLYY

SEQ ID NO: 8462 - protein, 17 aa, Artificial Sequence
  Cyclic GFR-binding peptide
KLEPLTVLYYDDSSNVI

SEQ ID NO: 8463 - protein, 19 aa, Artificial Sequence
  Cyclic GFR-binding peptide
EEEPLPMVYYRIKPHQGQH

SEQ ID NO: 8464 - protein, 18 aa, Artificial Sequence
  Cyclic GFR-binding peptide
TQLEPLPVVYYDDSSNVI

SEQ ID NO: 8465 - protein, 17 aa, Artificial Sequence
  Cyclic GFR-binding peptide
ELEPLPMVYYDEYDKVV

SEQ ID NO: 8466 - protein, 17 aa, Artificial Sequence
  Cyclic GFR-binding peptide
DLSNITIQIMVGRTPKV

SEQ ID NO: 8467 - protein, 19 aa, Artificial Sequence
  Cyclic GFR-binding peptide
  MOD_RES (6)..(6): Xaa is C or S
VTKPTXAPTKLEPLPVVYY

SEQ ID NO: 8468 - protein, 13 aa, Artificial Sequence
  Cyclic GFR-binding peptide
APTQLEPLPVVYY

SEQ ID NO: 8469 - protein, 19 aa, Artificial Sequence
  Cyclic GFR-binding peptide
  MOD_RES (4)..(4): Xaa is C or S
NVQXRPTQVQLSNITVQIM

SEQ ID NO: 8470 - protein, 16 aa, Artificial Sequence
  Cyclic GFR-binding peptide
  MOD_RES (2)..(3): Xaa is C or S
PXXAPTQLSNITVQIM

SEQ ID NO: 8471 - protein, 20 aa, Artificial Sequence
  Cyclic GFR-binding peptide
  MOD_RES (7)..(7): Xaa is C or S
HVTKPTXAPTKLSNITVQIM

SEQ ID NO: 8472 - protein, 16 aa, Artificial Sequence
  Cyclic GFR-binding peptide
  MOD_RES (2)..(3): Xaa is C or S
AXXVPTELEPLPMVYY

SEQ ID NO: 8473 - protein, 18 aa, Artificial Sequence
  Cyclic GFR-binding peptide
HRPVQVRKIEYVRKKPKL

SEQ ID NO: 8474 - protein, 17 aa, Artificial Sequence
  Cyclic GFR-binding peptide
EPLTVLYYEYVRKKPKL

SEQ ID NO: 8475 - protein, 19 aa, Artificial Sequence
  Cyclic GFR-binding peptide
  MOD_RES (4)..(4): Xaa is C or S
NVQXRPTQVQLEPLTVLYY

SEQ ID NO: 8476 - protein, 19 aa, Artificial Sequence
  Cyclic GFR-binding peptide
HHEPLTVLYYEYVRKKPKL

SEQ ID NO: 8477 - protein, 17 aa, Artificial Sequence
  Cyclic GFR-binding peptide
QLEPLTVLYYDDSSNVI

SEQ ID NO: 8478 - protein, 15 aa, Artificial Sequence
  Cyclic GFR-binding peptide
  MOD_RES (2)..(2): Xaa is C or S
EXVPTEERPVQMRKI

SEQ ID NO: 8479 - protein, 27 aa, Artificial Sequence
  Cyclic GFR-binding peptide
  MOD_RES (6)..(7): Xaa is C or S
SIPKAXXVPTELEPLTMLYYDEYDKVV

SEQ ID NO: 8480 - protein, 21 aa, Artificial Sequence
  Cyclic GFR-binding peptide
QVQLSNITVQIMEIVRKKPIF

SEQ ID NO: 8481 - protein, 14 aa, Artificial Sequence
  Cyclic GFR-binding peptide
  MOD_RES (1)..(1): Xaa is C or S
XAPTKLRPVQVRKI

SEQ ID NO: 8482 - protein, 18 aa, Artificial Sequence
  Cyclic GFR-binding peptide
LRSVKVAKVEIVRKKPIF

SEQ ID NO: 8483 - protein, 17 aa, Artificial Sequence
  Cyclic GFR-binding peptide
SNITVQIMEIVRKKPIF

SEQ ID NO: 8484 - protein, 13 aa, Artificial Sequence
  Cyclic GFR-binding peptide
FYLVSIANLKTPA

SEQ ID NO: 8485 - protein, 18 aa, Artificial Sequence
  Cyclic GFR-binding peptide
  MOD_RES (14)..(15): Xaa is C or S
FYLISIANLRTPVXXTPP

SEQ ID NO: 8486 - protein, 27 aa, Artificial Sequence
  Cyclic GFR-binding peptide
  MOD_RES (21)..(22): Xaa is C or S
VVNNASDFYLISIANLRTPVXXTPPTS

SEQ ID NO: 8487 - protein, 16 aa, Artificial Sequence
  Cyclic GFR-binding peptide
  MOD_RES (14)..(15): Xaa is C or S
FYLMSIANMKTPTXXP

SEQ ID NO: 8488 - protein, 27 aa, Artificial Sequence
  Cyclic GFR-binding peptide
  MOD_RES (21)..(22): Xaa is C or S
TPVGMDDFYLVSIANLKTPVXXAKGVK

SEQ ID NO: 8489 - protein, 19 aa, Artificial Sequence
  Cyclic GFR-binding peptide
VVKENEDFYLMSIANLETP

SEQ ID NO: 8490 - protein, 17 aa, Artificial Sequence
  Cyclic GFR-binding peptide
IVNNSSDFYLVSIANLK

SEQ ID NO: 8491 - protein, 27 aa, Artificial Sequence
  Cyclic GFR-binding peptide
  MOD_RES (21)..(22): Xaa is C or S
VVKENEDFYLMSIANLETPVXXAKPIK

SEQ ID NO: 8492 - protein, 17 aa, Artificial Sequence
  Cyclic GFR-binding peptide
LLVRGNDFYLMSIANTK

SEQ ID NO: 8493 - protein, 19 aa, Artificial Sequence
  Cyclic GFR-binding peptide
IIQQKDNFYLMSIANMKTP

SEQ ID NO: 8494 - protein, 15 aa, Artificial Sequence
  Cyclic GFR-binding peptide
TPVGMDDFYLVSIAN

SEQ ID NO: 8495 - protein, 14 aa, Artificial Sequence
  Cyclic GFR-binding peptide
  MOD_RES (14)..(14): Xaa is C or S
FYLISIANLKTPVX

SEQ ID NO: 8496 - protein, 18 aa, Artificial Sequence
  Cyclic GFR-binding peptide
VVKENEDFYLMSIANLET

SEQ ID NO: 8497 - protein, 16 aa, Artificial Sequence
  Cyclic GFR-binding peptide
IIQQKDNFYLMSIANM

SEQ ID NO: 8498 - protein, 17 aa, Artificial Sequence
  Cyclic GFR-binding peptide
  MOD_RES (14)..(15): Xaa is C or S
FYLVSIANLKTPAXXAK

SEQ ID NO: 8499 - protein, 20 aa, Artificial Sequence
  Cyclic GFR-binding peptide
  MOD_RES (14)..(15): Xaa is C or S
FYLISIANLRAPVXXSAPAA

SEQ ID NO: 8500 - protein, 14 aa, Artificial Sequence
  Cyclic GFR-binding peptide
  MOD_RES (14)..(14): Xaa is C or S
FYLVSIANLQTPAX

SEQ ID NO: 8501 - protein, 15 aa, Artificial Sequence
  Cyclic GFR-binding peptide
  MOD_RES (14)..(15): Xaa is C or S
FYLMSIANTKVPAXX

SEQ ID NO: 8502 - protein, 16 aa, Artificial Sequence
  Cyclic GFR-binding peptide
TPVGMDDFYLVSIANL

SEQ ID NO: 8503 - protein, 14 aa, Artificial Sequence
  Cyclic GFR-binding peptide
  MOD_RES (14)..(14): Xaa is C or S
FYLVSIANLKTPAX

SEQ ID NO: 8504 - protein, 27 aa, Artificial Sequence
  Cyclic GFR-binding peptide
  MOD_RES (21)..(22): Xaa is C or S
VVKDYEDFYLMSIANLETPVXXAKPIS

SEQ ID NO: 8505 - protein, 15 aa, Artificial Sequence
  Cyclic GFR-binding peptide
  MOD_RES (14)..(14): Xaa is C or S
FYLVSIANLKTPAXT

SEQ ID NO: 8506 - protein, 20 aa, Artificial Sequence
  Cyclic GFR-binding peptide
  MOD_RES (14)..(14): Xaa is C or S
FYLVSIANLKTPAXTPKTVH

SEQ ID NO: 8507 - protein, 17 aa, Artificial Sequence
  Cyclic GFR-binding peptide
  MOD_RES (14)..(15): Xaa is C or S
FYLVSIANLKTPVXXAK

SEQ ID NO: 8508 - protein, 19 aa, Artificial Sequence
  Cyclic GFR-binding peptide
  MOD_RES (14)..(15): Xaa is C or S
FYLISIANLRTPVXXTPPT

SEQ ID NO: 8509 - protein, 15 aa, Artificial Sequence
  Cyclic GFR-binding peptide
  MOD_RES (14)..(15): Xaa is C or S
FYLMSIANMKTPTXX

SEQ ID NO: 8510 - protein, 16 aa, Artificial Sequence
  Cyclic GFR-binding peptide
VVKDYEDFYLMSIANL

SEQ ID NO: 8511 - protein, 19 aa, Artificial Sequence
  Cyclic GFR-binding peptide
  MOD_RES (14)..(14): Xaa is C or S
FYLVSIANLKTPAXTPKTV

SEQ ID NO: 8512 - protein, 19 aa, Artificial Sequence
  Cyclic GFR-binding peptide
TPVGMDDFYLVSIANLKTP

SEQ ID NO: 8513 - protein, 18 aa, Artificial Sequence
  Cyclic GFR-binding peptide
YTVVGKDFYLISIANLKT

SEQ ID NO: 8514 - protein, 20 aa, Artificial Sequence
  Cyclic GFR-binding peptide
  MOD_RES (14)..(15): Xaa is C or S
FYLVSIANLKTPVXXAKGVK

SEQ ID NO: 8515 - protein, 17 aa, Artificial Sequence
  Cyclic GFR-binding peptide
  MOD_RES (14)..(15): Xaa is C or S
FYLMSIANMKTPTXXPG

SEQ ID NO: 8516 - protein, 16 aa, Artificial Sequence
  Cyclic GFR-binding peptide
  MOD_RES (14)..(15): Xaa is C or S
FYLVSIANLKTPAXXP

SEQ ID NO: 8517 - protein, 17 aa, Artificial Sequence
  Cyclic GFR-binding peptide
VVNNASDFYLISIANLR

SEQ ID NO: 8518 - protein, 18 aa, Artificial Sequence
  Cyclic GFR-binding peptide
  MOD_RES (14)..(15): Xaa is C or S
FYLVSIANLKTPAXXAKP

SEQ ID NO: 8519 - protein, 17 aa, Artificial Sequence
  Cyclic GFR-binding peptide
IVNSSDDFYLVSIANLQ

SEQ ID NO: 8520 - protein, 16 aa, Artificial Sequence
  Cyclic GFR-binding peptide
  MOD_RES (14)..(15): Xaa is C or S
FYLISIANLRTPVXXT

SEQ ID NO: 8521 - protein, 20 aa, Artificial Sequence
  Cyclic GFR-binding peptide
  MOD_RES (14)..(15): Xaa is C or S
FYLISIANLRTPVXXTPPTS

SEQ ID NO: 8522 - protein, 13 aa, Artificial Sequence
  Cyclic GFR-binding peptide
FYLVSIANLKTPV

SEQ ID NO: 8523 - protein, 17 aa, Artificial Sequence
  Cyclic GFR-binding peptide
VVKDYEDFYLMSIANLE

SEQ ID NO: 8524 - protein, 27 aa, Artificial Sequence
  Cyclic GFR-binding peptide
  MOD_RES (21)..(22): Xaa is C or S
YTVVGKDFYLISIANLKTPVXXAKSAK

SEQ ID NO: 8525 - protein, 20 aa, Artificial Sequence
  Cyclic GFR-binding peptide
  MOD_RES (14)..(15): Xaa is C or S
FYLMSIANLETPVXXAKPIK

SEQ ID NO: 8526 - protein, 19 aa, Artificial Sequence
  Cyclic GFR-binding peptide
  MOD_RES (14)..(15): Xaa is C or S
FYLVSIANLKTPAXXAKPV

SEQ ID NO: 8527 - protein, 17 aa, Artificial Sequence
  Cyclic GFR-binding peptide
IVNSSDDFYLVSIANLK

SEQ ID NO: 8528 - protein, 27 aa, Artificial Sequence
  Cyclic GFR-binding peptide
  MOD_RES (21)..(22): Xaa is C or S
IVNSSDDFYLVSIANLQTPAXXPKPVT

SEQ ID NO: 8529 - protein, 17 aa, Artificial Sequence
  Cyclic GFR-binding peptide
VVKENEDFYLMSIANLE

SEQ ID NO: 8530 - protein, 27 aa, Artificial Sequence
  Cyclic GFR-binding peptide
  MOD_RES (21)..(22): Xaa is C or S
LLVRGNDFYLMSIANTKVPAXXTSPVR

SEQ ID NO: 8531 - protein, 13 aa, Artificial Sequence
  Cyclic GFR-binding peptide
FYLISIANLRTPV

SEQ ID NO: 8532 - protein, 15 aa, Artificial Sequence
  Cyclic GFR-binding peptide
VVNNASDFYLISIAN

SEQ ID NO: 8533 - protein, 15 aa, Artificial Sequence
  Cyclic GFR-binding peptide
  MOD_RES (14)..(15): Xaa is C or S
FYLVSIANLQTPAXX

SEQ ID NO: 8534 - protein, 19 aa, Artificial Sequence
  Cyclic GFR-binding peptide
  MOD_RES (14)..(15): Xaa is C or S
FYLMSIANLETPVXXAKPI

SEQ ID NO: 8535 - protein, 27 aa, Artificial Sequence
  Cyclic GFR-binding peptide
  MOD_RES (21)..(22): Xaa is C or S
IVNSSDDFYLVSIANLKTPAXXPKPVY

SEQ ID NO: 8536 - protein, 16 aa, Artificial Sequence
  Cyclic GFR-binding peptide
  MOD_RES (14)..(15): Xaa is C or S
FYLISIANLRAPVXXS

SEQ ID NO: 8537 - protein, 27 aa, Artificial Sequence
  Cyclic GFR-binding peptide
  MOD_RES (21)..(22): Xaa is C or S
IVNSSDDFYLVSIANLKTPAXXPKPVH

SEQ ID NO: 8538 - protein, 18 aa, Artificial Sequence
  Cyclic GFR-binding peptide
IVNNSSDFYLVSIANLKT

SEQ ID NO: 8539 - protein, 16 aa, Artificial Sequence
  Cyclic GFR-binding peptide
VVKENEDFYLMSIANL

SEQ ID NO: 8540 - protein, 15 aa, Artificial Sequence
  Cyclic GFR-binding peptide
  MOD_RES (14)..(15): Xaa is C or S
FYLMSIANLETPVXX

SEQ ID NO: 8541 - protein, 16 aa, Artificial Sequence
  Cyclic GFR-binding peptide
YTVVGKDFYLISIANL

SEQ ID NO: 8542 - protein, 20 aa, Artificial Sequence
  Cyclic GFR-binding peptide
  MOD_RES (14)..(15): Xaa is C or S
FYLMSIANLETPVXXAKPIS

SEQ ID NO: 8543 - protein, 17 aa, Artificial Sequence
  Cyclic GFR-binding peptide
YTVVGKDFYLISIANLK

SEQ ID NO: 8544 - protein, 20 aa, Artificial Sequence
  Cyclic GFR-binding peptide
  MOD_RES (14)..(15): Xaa is C or S
FYLVSIANLKTPAXXPKPVY

SEQ ID NO: 8545 - protein, 19 aa, Artificial Sequence
  Cyclic GFR-binding peptide
  MOD_RES (14)..(15): Xaa is C or S
FYLISIANLRAPVXXSAPA

SEQ ID NO: 8546 - protein, 13 aa, Artificial Sequence
  Cyclic GFR-binding peptide
FYLISIANLKTPV

SEQ ID NO: 8547 - protein, 16 aa, Artificial Sequence
  Cyclic GFR-binding peptide
  MOD_RES (14)..(15): Xaa is C or S
FYLMSIANLETPVXXA

SEQ ID NO: 8548 - protein, 18 aa, Artificial Sequence
  Cyclic GFR-binding peptide
  MOD_RES (14)..(15): Xaa is C or S
FYLVSIANLQTPAXXPKP

SEQ ID NO: 8549 - protein, 18 aa, Artificial Sequence
  Cyclic GFR-binding peptide
  MOD_RES (14)..(15): Xaa is C or S
FYLMSIANMKTPTXXPGA

SEQ ID NO: 8550 - protein, 15 aa, Artificial Sequence
  Cyclic GFR-binding peptide
  MOD_RES (14)..(15): Xaa is C or S
FYLISIANLKTPVXX

SEQ ID NO: 8551 - protein, 15 aa, Artificial Sequence
  Cyclic GFR-binding peptide
VVNNAADFYLISIAN

SEQ ID NO: 8552 - protein, 20 aa, Artificial Sequence
  Cyclic GFR-binding peptide
  MOD_RES (14)..(15): Xaa is C or S
FYLISIANLKTPVXXAKSAK

SEQ ID NO: 8553 - protein, 13 aa, Artificial Sequence
  Cyclic GFR-binding peptide
FYLVSIANLQTPA

SEQ ID NO: 8554 - protein, 18 aa, Artificial Sequence
  Cyclic GFR-binding peptide
LLVRGNDFYLMSIANTKV

SEQ ID NO: 8555 - protein, 18 aa, Artificial Sequence
  Cyclic GFR-binding peptide
IVNSSDDFYLVSIANLQT

SEQ ID NO: 8556 - protein, 16 aa, Artificial Sequence
  Cyclic GFR-binding peptide
LLVRGNDFYLMSIANT

SEQ ID NO: 8557 - protein, 16 aa, Artificial Sequence
  Cyclic GFR-binding peptide
IVNNSSDFYLVSIANL

SEQ ID NO: 8558 - protein, 13 aa, Artificial Sequence
  Cyclic GFR-binding peptide
FYLISIANLRAPV

SEQ ID NO: 8559 - protein, 19 aa, Artificial Sequence
  Cyclic GFR-binding peptide
IVNSSDDFYLVSIANLKTP

SEQ ID NO: 8560 - protein, 13 aa, Artificial Sequence
  Cyclic GFR-binding peptide
FYLMSIANLETPV

SEQ ID NO: 8561 - protein, 16 aa, Artificial Sequence
  Cyclic GFR-binding peptide
  MOD_RES (14)..(15): Xaa is C or S
FYLVSIANLKTPAXXA

SEQ ID NO: 8562 - protein, 16 aa, Artificial Sequence
  Cyclic GFR-binding peptide
  MOD_RES (14)..(15): Xaa is C or S
FYLISIANLKTPVXXA

SEQ ID NO: 8563 - protein, 15 aa, Artificial Sequence
  Cyclic GFR-binding peptide
YTVVGKDFYLISIAN

SEQ ID NO: 8564 - protein, 19 aa, Artificial Sequence
  Cyclic GFR-binding peptide
  MOD_RES (14)..(15): Xaa is C or S
FYLMSIANMKTPTXXPGAS

SEQ ID NO: 8565 - protein, 18 aa, Artificial Sequence
  Cyclic GFR-binding peptide
VVKDYEDFYLMSIANLET

SEQ ID NO: 8566 - protein, 18 aa, Artificial Sequence
  Cyclic GFR-binding peptide
VVNNASDFYLISIANLRT

SEQ ID NO: 8567 - protein, 19 aa, Artificial Sequence
  Cyclic GFR-binding peptide
LLVRGNDFYLMSIANTKVP

SEQ ID NO: 8568 - protein, 18 aa, Artificial Sequence
  Cyclic GFR-binding peptide
VVNNAADFYLISIANLRA

SEQ ID NO: 8569 - protein, 18 aa, Artificial Sequence
  Cyclic GFR-binding peptide
IVNSSDDFYLVSIANLKT

SEQ ID NO: 8570 - protein, 18 aa, Artificial Sequence
  Cyclic GFR-binding peptide
  MOD_RES (14)..(15): Xaa is C or S
FYLISIANLKTPVXXAKS

SEQ ID NO: 8571 - protein, 20 aa, Artificial Sequence
  Cyclic GFR-binding peptide
  MOD_RES (14)..(15): Xaa is C or S
FYLMSIANMKTPTXXPGASG

SEQ ID NO: 8572 - protein, 15 aa, Artificial Sequence
  Cyclic GFR-binding peptide
  MOD_RES (14)..(15): Xaa is C or S
FYLVSIANLKTPVXX

SEQ ID NO: 8573 - protein, 16 aa, Artificial Sequence
  Cyclic GFR-binding peptide
  MOD_RES (14)..(14): Xaa is C or S
FYLVSIANLKTPAXTP

SEQ ID NO: 8574 - protein, 15 aa, Artificial Sequence
  Cyclic GFR-binding peptide
  MOD_RES (14)..(15): Xaa is C or S
FYLISIANLRTPVXX

SEQ ID NO: 8575 - protein, 19 aa, Artificial Sequence
  Cyclic GFR-binding peptide
VVNNAADFYLISIANLRAP

SEQ ID NO: 8576 - protein, 16 aa, Artificial Sequence
  Cyclic GFR-binding peptide
IVNSSDDFYLVSIANL

SEQ ID NO: 8577 - protein, 17 aa, Artificial Sequence
  Cyclic GFR-binding peptide
  MOD_RES (14)..(15): Xaa is C or S
FYLVSIANLQTPAXXPK

SEQ ID NO: 8578 - protein, 15 aa, Artificial Sequence
  Cyclic GFR-binding peptide
IVNNSSDFYLVSIAN

SEQ ID NO: 8579 - protein, 19 aa, Artificial Sequence
  Cyclic GFR-binding peptide
  MOD_RES (14)..(15): Xaa is C or S
FYLVSIANLQTPAXXPKPV

SEQ ID NO: 8580 - protein, 19 aa, Artificial Sequence
  Cyclic GFR-binding peptide
  MOD_RES (14)..(15): Xaa is C or S
FYLVSIANLKTPVXXAKGV

SEQ ID NO: 8581 - protein, 17 aa, Artificial Sequence
  Cyclic GFR-binding peptide
  MOD_RES (14)..(15): Xaa is C or S
FYLISIANLRAPVXXSA

SEQ ID NO: 8582 - protein, 20 aa, Artificial Sequence
  Cyclic GFR-binding peptide
  MOD_RES (14)..(15): Xaa is C or S
FYLVSIANLKTPAXXAKPVA

SEQ ID NO: 8583 - protein, 19 aa, Artificial Sequence
  Cyclic GFR-binding peptide
VVNNASDFYLISIANLRTP

SEQ ID NO: 8584 - protein, 14 aa, Artificial Sequence
  Cyclic GFR-binding peptide
  MOD_RES (14)..(14): Xaa is C or S
FYLISIANLRAPVX

SEQ ID NO: 8585 - protein, 14 aa, Artificial Sequence
  Cyclic GFR-binding peptide
  MOD_RES (14)..(14): Xaa is C or S
FYLMSIANLETPVX

SEQ ID NO: 8586 - protein, 16 aa, Artificial Sequence
  Cyclic GFR-binding peptide
  MOD_RES (14)..(15): Xaa is C or S
FYLVSIANLKTPVXXA

SEQ ID NO: 8587 - protein, 17 aa, Artificial Sequence
  Cyclic GFR-binding peptide
  MOD_RES (14)..(15): Xaa is C or S
FYLVSIANLKTPAXXPK

SEQ ID NO: 8588 - protein, 13 aa, Artificial Sequence
  Cyclic GFR-binding peptide
FYLMSIANMKTPT

SEQ ID NO: 8589 - protein, 18 aa, Artificial Sequence
  Cyclic GFR-binding peptide
  MOD_RES (14)..(15): Xaa is C or S
FYLMSIANTKVPAXXTSP

SEQ ID NO: 8590 - protein, 16 aa, Artificial Sequence
  Cyclic GFR-binding peptide
  MOD_RES (14)..(15): Xaa is C or S
FYLVSIANLQTPAXXP

SEQ ID NO: 8591 - protein, 20 aa, Artificial Sequence
  Cyclic GFR-binding peptide
  MOD_RES (14)..(15): Xaa is C or S
FYLMSIANTKVPAXXTSPVR

SEQ ID NO: 8592 - protein, 19 aa, Artificial Sequence
  Cyclic GFR-binding peptide
  MOD_RES (14)..(15): Xaa is C or S
FYLVSIANLKTPAXXPKPV

SEQ ID NO: 8593 - protein, 17 aa, Artificial Sequence
  Cyclic GFR-binding peptide
VVNNAADFYLISIANLR

SEQ ID NO: 8594 - protein, 20 aa, Artificial Sequence
  Cyclic GFR-binding peptide
  MOD_RES (14)..(15): Xaa is C or S
FYLVSIANLQTPAXXPKPVT

SEQ ID NO: 8595 - protein, 19 aa, Artificial Sequence
  Cyclic GFR-binding peptide
  MOD_RES (14)..(15): Xaa is C or S
FYLISIANLKTPVXXAKSA

SEQ ID NO: 8596 - protein, 18 aa, Artificial Sequence
  Cyclic GFR-binding peptide
  MOD_RES (14)..(15): Xaa is C or S
FYLISIANLRAPVXXSAP

SEQ ID NO: 8597 - protein, 14 aa, Artificial Sequence
  Cyclic GFR-binding peptide
  MOD_RES (14)..(14): Xaa is C or S
FYLVSIANLKTPVX

SEQ ID NO: 8598 - protein, 14 aa, Artificial Sequence
  Cyclic GFR-binding peptide
  MOD_RES (14)..(14): Xaa is C or S
FYLISIANLRTPVX

SEQ ID NO: 8599 - protein, 16 aa, Artificial Sequence
  Cyclic GFR-binding peptide
  MOD_RES (14)..(15): Xaa is C or S
FYLMSIANTKVPAXXT

SEQ ID NO: 8600 - protein, 16 aa, Artificial Sequence
  Cyclic GFR-binding peptide
VVNNASDFYLISIANL

SEQ ID NO: 8601 - protein, 15 aa, Artificial Sequence
  Cyclic GFR-binding peptide
IVNSSDDFYLVSIAN

SEQ ID NO: 8602 - protein, 15 aa, Artificial Sequence
  Cyclic GFR-binding peptide
VVKENEDFYLMSIAN

SEQ ID NO: 8603 - protein, 14 aa, Artificial Sequence
  Cyclic GFR-binding peptide
  MOD_RES (14)..(14): Xaa is C or S
FYLMSIANTKVPAX

SEQ ID NO: 8604 - protein, 18 aa, Artificial Sequence
  Cyclic GFR-binding peptide
  MOD_RES (14)..(15): Xaa is C or S
FYLMSIANLETPVXXAKP

SEQ ID NO: 8605 - protein, 17 aa, Artificial Sequence
  Cyclic GFR-binding peptide
  MOD_RES (14)..(14): Xaa is C or S
FYLVSIANLKTPAXTPK

SEQ ID NO: 8606 - protein, 18 aa, Artificial Sequence
  Cyclic GFR-binding peptide
  MOD_RES (14)..(14): Xaa is C or S
FYLVSIANLKTPAXTPKT

SEQ ID NO: 8607 - protein, 27 aa, Artificial Sequence
  Cyclic GFR-binding peptide
  MOD_RES (21)..(22): Xaa is C or S
VVNNAADFYLISIANLRAPVXXSAPAA

SEQ ID NO: 8608 - protein, 13 aa, Artificial Sequence
  Cyclic GFR-binding peptide
FYLMSIANTKVPA

SEQ ID NO: 8609 - protein, 14 aa, Artificial Sequence
  Cyclic GFR-binding peptide
  MOD_RES (14)..(14): Xaa is C or S
FYLMSIANMKTPTX

SEQ ID NO: 8610 - protein, 18 aa, Artificial Sequence
  Cyclic GFR-binding peptide
TPVGMDDFYLVSIANLKT

SEQ ID NO: 8611 - protein, 15 aa, Artificial Sequence
  Cyclic GFR-binding peptide
VVKDYEDFYLMSIAN

SEQ ID NO: 8612 - protein, 19 aa, Artificial Sequence
  Cyclic GFR-binding peptide
YTVVGKDFYLISIANLKTP

SEQ ID NO: 8613 - protein, 17 aa, Artificial Sequence
  Cyclic GFR-binding peptide
TPVGMDDFYLVSIANLK

SEQ ID NO: 8614 - protein, 15 aa, Artificial Sequence
  Cyclic GFR-binding peptide
  MOD_RES (14)..(15): Xaa is C or S
FYLVSIANLKTPAXX

SEQ ID NO: 8615 - protein, 19 aa, Artificial Sequence
  Cyclic GFR-binding peptide
  MOD_RES (14)..(15): Xaa is C or S
FYLMSIANTKVPAXXTSPV

SEQ ID NO: 8616 - protein, 17 aa, Artificial Sequence
  Cyclic GFR-binding peptide
  MOD_RES (14)..(15): Xaa is C or S
FYLISIANLKTPVXXAK

SEQ ID NO: 8617 - protein, 17 aa, Artificial Sequence
  Cyclic GFR-binding peptide
IIQQKDNFYLMSIANMK

SEQ ID NO: 8618 - protein, 27 aa, Artificial Sequence
  Cyclic GFR-binding peptide
  MOD_RES (21)..(22): Xaa is C or S
IVNNSSDFYLVSIANLKTPAXXAKPVA

SEQ ID NO: 8619 - protein, 15 aa, Artificial Sequence
  Cyclic GFR-binding peptide
IIQQKDNFYLMSIAN

SEQ ID NO: 8620 - protein, 18 aa, Artificial Sequence
  Cyclic GFR-binding peptide
  MOD_RES (14)..(15): Xaa is C or S
FYLVSIANLKTPVXXAKG

SEQ ID NO: 8621 - protein, 17 aa, Artificial Sequence
  Cyclic GFR-binding peptide
  MOD_RES (14)..(15): Xaa is C or S
FYLISIANLRTPVXXTP

SEQ ID NO: 8622 - protein, 15 aa, Artificial Sequence
  Cyclic GFR-binding peptide
  MOD_RES (14)..(15): Xaa is C or S
FYLISIANLRAPVXX

SEQ ID NO: 8623 - protein, 17 aa, Artificial Sequence
  Cyclic GFR-binding peptide
  MOD_RES (14)..(15): Xaa is C or S
FYLMSIANLETPVXXAK

SEQ ID NO: 8624 - protein, 27 aa, Artificial Sequence
  Cyclic GFR-binding peptide
  MOD_RES (21)..(22): Xaa is C or S
IIQQKDNFYLMSIANMKTPTXXPGASG

SEQ ID NO: 8625 - protein, 19 aa, Artificial Sequence
  Cyclic GFR-binding peptide
IVNSSDDFYLVSIANLQTP

SEQ ID NO: 8626 - protein, 16 aa, Artificial Sequence
  Cyclic GFR-binding peptide
VVNNAADFYLISIANL

SEQ ID NO: 8627 - protein, 27 aa, Artificial Sequence
  Cyclic GFR-binding peptide
  MOD_RES (21)..(21): Xaa is C or S
IVNSSDDFYLVSIANLKTPAXTPKTVH

SEQ ID NO: 8628 - protein, 18 aa, Artificial Sequence
  Cyclic GFR-binding peptide
  MOD_RES (14)..(15): Xaa is C or S
FYLVSIANLKTPAXXPKP

SEQ ID NO: 8629 - protein, 18 aa, Artificial Sequence
  Cyclic GFR-binding peptide
IIQQKDNFYLMSIANMKT

SEQ ID NO: 8630 - protein, 15 aa, Artificial Sequence
  Cyclic GFR-binding peptide
LLVRGNDFYLMSIAN

SEQ ID NO: 8631 - protein, 17 aa, Artificial Sequence
  Cyclic GFR-binding peptide
  MOD_RES (14)..(15): Xaa is C or S
FYLMSIANTKVPAXXTS

SEQ ID NO: 8632 - protein, 19 aa, Artificial Sequence
  Cyclic GFR-binding peptide
VVKDYEDFYLMSIANLETP

SEQ ID NO: 8633 - protein, 19 aa, Artificial Sequence
  Cyclic GFR-binding peptide
IVNNSSDFYLVSIANLKTP

SEQ ID NO: 8634 - protein, 18 aa, Artificial Sequence
  Cyclic GFR-binding peptide
  MOD_RES (4)..(5): Xaa is C or S
PPTXXVPTRLNAISILYF

SEQ ID NO: 8635 - protein, 27 aa, Artificial Sequence
  Cyclic GFR-binding peptide
  MOD_RES (6)..(7): Xaa is C or S
STPPTXXVPTRLNAISILYFDSANNVV

SEQ ID NO: 8636 - protein, 16 aa, Artificial Sequence
  Cyclic GFR-binding peptide
  MOD_RES (2)..(3): Xaa is C or S
PXXTPTKMNAISMLYF

SEQ ID NO: 8637 - protein, 27 aa, Artificial Sequence
  Cyclic GFR-binding peptide
  MOD_RES (6)..(7): Xaa is C or S
KVGKAXXVPTKLNAISVLYFDDMGVPT

SEQ ID NO: 8638 - protein, 19 aa, Artificial Sequence
  Cyclic GFR-binding peptide
PTELNAISMLYFDENEKVV

SEQ ID NO: 8639 - protein, 17 aa, Artificial Sequence
  Cyclic GFR-binding peptide
KLNAISVLYFDSSNNVI

SEQ ID NO: 8640 - protein, 27 aa, Artificial Sequence
  Cyclic GFR-binding peptide
  MOD_RES (6)..(7): Xaa is C or S
KIPKAXXVPTELNAISMLYFDENEKVV

SEQ ID NO: 8641 - protein, 17 aa, Artificial Sequence
  Cyclic GFR-binding peptide
KTNAISMLYFDNGRVLL

SEQ ID NO: 8642 - protein, 19 aa, Artificial Sequence
  Cyclic GFR-binding peptide
PTKMNAISMLYFNDKQQII

SEQ ID NO: 8643 - protein, 15 aa, Artificial Sequence
  Cyclic GFR-binding peptide
NAISVLYFDDMGVPT

SEQ ID NO: 8644 - protein, 14 aa, Artificial Sequence
  Cyclic GFR-binding peptide
  MOD_RES (1)..(1): Xaa is C or S
XVPTKLNAISILYF

SEQ ID NO: 8645 - protein, 18 aa, Artificial Sequence
  Cyclic GFR-binding peptide
TELNAISMLYFDENEKVV

SEQ ID NO: 8646 - protein, 16 aa, Artificial Sequence
  Cyclic GFR-binding peptide
MNAISMLYFNDKQQII

SEQ ID NO: 8647 - protein, 17 aa, Artificial Sequence
  Cyclic GFR-binding peptide
  MOD_RES (3)..(4): Xaa is C or S
KAXXAPTKLNAISVLYF

SEQ ID NO: 8648 - protein, 20 aa, Artificial Sequence
  Cyclic GFR-binding peptide
  MOD_RES (6)..(7): Xaa is C or S
AAPASXXVPARLNAISILYF

SEQ ID NO: 8649 - protein, 15 aa, Artificial Sequence
  Cyclic GFR-binding peptide
  MOD_RES (1)..(2): Xaa is C or S
XXAPVKTNAISMLYF

SEQ ID NO: 8650 - protein, 16 aa, Artificial Sequence
  Cyclic GFR-binding peptide
LNAISVLYFDDMGVPT

SEQ ID NO: 8651 - protein, 27 aa, Artificial Sequence
  Cyclic GFR-binding peptide
  MOD_RES (6)..(7): Xaa is C or S
SIPKAXXVPTELNAISMLYFDEYDKVV

SEQ ID NO: 8652 - protein, 17 aa, Artificial Sequence
  Cyclic GFR-binding peptide
  MOD_RES (3)..(4): Xaa is C or S
KAXXVPTKLNAISVLYF

SEQ ID NO: 8653 - protein, 19 aa, Artificial Sequence
  Cyclic GFR-binding peptide
  MOD_RES (5)..(6): Xaa is C or S
TPPTXXVPTRLNAISILYF

SEQ ID NO: 8654 - protein, 15 aa, Artificial Sequence
  Cyclic GFR-binding peptide
  MOD_RES (1)..(2): Xaa is C or S
XXTPTKMNAISMLYF

SEQ ID NO: 8655 - protein, 16 aa, Artificial Sequence
  Cyclic GFR-binding peptide
LNAISMLYFDEYDKVV

SEQ ID NO: 8656 - protein, 19 aa, Artificial Sequence
  Cyclic GFR-binding peptide
PTKLNAISVLYFDDMGVPT

SEQ ID NO: 8657 - protein, 18 aa, Artificial Sequence
  Cyclic GFR-binding peptide
TKLNAISILYFDKGVVTY

SEQ ID NO: 8658 - protein, 20 aa, Artificial Sequence
  Cyclic GFR-binding peptide
  MOD_RES (6)..(7): Xaa is C or S
KVGKAXXVPTKLNAISVLYF

SEQ ID NO: 8659 - protein, 17 aa, Artificial Sequence
  Cyclic GFR-binding peptide
  MOD_RES (3)..(4): Xaa is C or S
GPXXTPTKMNAISMLYF

SEQ ID NO: 8660 - protein, 17 aa, Artificial Sequence
  Cyclic GFR-binding peptide
RLNAISILYFDSANNVV

SEQ ID NO: 8661 - protein, 18 aa, Artificial Sequence
  Cyclic GFR-binding peptide
  MOD_RES (4)..(5): Xaa is C or S
PKAXXAPTKLNAISVLYF

SEQ ID NO: 8662 - protein, 16 aa, Artificial Sequence
  Cyclic GFR-binding peptide
  MOD_RES (2)..(3): Xaa is C or S
TXXVPTRLNAISILYF

SEQ ID NO: 8663 - protein, 20 aa, Artificial Sequence
  Cyclic GFR-binding peptide
  MOD_RES (6)..(7): Xaa is C or S
STPPTXXVPTRLNAISILYF

SEQ ID NO: 8664 - protein, 13 aa, Artificial Sequence
  Cyclic GFR-binding peptide
VPTKLNAISVLYF

SEQ ID NO: 8665 - protein, 17 aa, Artificial Sequence
  Cyclic GFR-binding peptide
ELNAISMLYFDEYDKVV

SEQ ID NO: 8666 - protein, 27 aa, Artificial Sequence
  Cyclic GFR-binding peptide
  MOD_RES (6)..(7): Xaa is C or S
KASKAXXVPTKLNAISILYFDKGVVTY

SEQ ID NO: 8667 - protein, 20 aa, Artificial Sequence
  Cyclic GFR-binding peptide
  MOD_RES (6)..(7): Xaa is C or S
KIPKAXXVPTELNAISMLYF

SEQ ID NO: 8668 - protein, 19 aa, Artificial Sequence
  Cyclic GFR-binding peptide
  MOD_RES (5)..(6): Xaa is C or S
VPKAXXAPTKLNAISVLYF

SEQ ID NO: 8669 - protein, 17 aa, Artificial Sequence
  Cyclic GFR-binding peptide
ELNAISMLYFDENEKVV

SEQ ID NO: 8670 - protein, 27 aa, Artificial Sequence
  Cyclic GFR-binding peptide
  MOD_RES (6)..(7): Xaa is C or S
RVPSTXXAPVKTNAISMLYFDNGRVLL

SEQ ID NO: 8671 - protein, 13 aa, Artificial Sequence
  Cyclic GFR-binding peptide
VPTRLNAISILYF

SEQ ID NO: 8672 - protein, 15 aa, Artificial Sequence
  Cyclic GFR-binding peptide
NAISILYFDSANNVV

SEQ ID NO: 8673 - protein, 19 aa, Artificial Sequence
  Cyclic GFR-binding peptide
  MOD_RES (5)..(6): Xaa is C or S
IPKAXXVPTELNAISMLYF

SEQ ID NO: 8674 - protein, 16 aa, Artificial Sequence
  Cyclic GFR-binding peptide
  MOD_RES (2)..(3): Xaa is C or S
SXXVPARLNAISILYF

SEQ ID NO: 8675 - protein, 18 aa, Artificial Sequence
  Cyclic GFR-binding peptide
TKLNAISVLYFDSSNNVI

SEQ ID NO: 8676 - protein, 16 aa, Artificial Sequence
  Cyclic GFR-binding peptide
LNAISMLYFDENEKVV

SEQ ID NO: 8677 - protein, 15 aa, Artificial Sequence
  Cyclic GFR-binding peptide
  MOD_RES (1)..(2): Xaa is C or S
XXVPTELNAISMLYF

SEQ ID NO: 8678 - protein, 16 aa, Artificial Sequence
  Cyclic GFR-binding peptide
LNAISILYFDKGVVTY

SEQ ID NO: 8679 - protein, 20 aa, Artificial Sequence
  Cyclic GFR-binding peptide
  MOD_RES (6)..(7): Xaa is C or S
SIPKAXXVPTELNAISMLYF

SEQ ID NO: 8680 - protein, 17 aa, Artificial Sequence
  Cyclic GFR-binding peptide
KLNAISILYFDKGVVTY

SEQ ID NO: 8681 - protein, 19 aa, Artificial Sequence
  Cyclic GFR-binding peptide
  MOD_RES (5)..(6): Xaa is C or S
APASXXVPARLNAISILYF

SEQ ID NO: 8682 - protein, 13 aa, Artificial Sequence
  Cyclic GFR-binding peptide
VPTKLNAISILYF

SEQ ID NO: 8683 - protein, 16 aa, Artificial Sequence
  Cyclic GFR-binding peptide
  MOD_RES (2)..(3): Xaa is C or S
AXXVPTELNAISMLYF

SEQ ID NO: 8684 - protein, 18 aa, Artificial Sequence
  Cyclic GFR-binding peptide
  MOD_RES (4)..(5): Xaa is C or S
AGPXXTPTKMNAISMLYF

SEQ ID NO: 8685 - protein, 15 aa, Artificial Sequence
  Cyclic GFR-binding peptide
  MOD_RES (1)..(2): Xaa is C or S
XXVPTKLNAISILYF

SEQ ID NO: 8686 - protein, 15 aa, Artificial Sequence
  Cyclic GFR-binding peptide
NAISILYFDAANNVV

SEQ ID NO: 8687 - protein, 20 aa, Artificial Sequence
  Cyclic GFR-binding peptide
  MOD_RES (6)..(7): Xaa is C or S
KASKAXXVPTKLNAISILYF

SEQ ID NO: 8688 - protein, 18 aa, Artificial Sequence
  Cyclic GFR-binding peptide
VKTNAISMLYFDNGRVLL

SEQ ID NO: 8689 - protein, 16 aa, Artificial Sequence
  Cyclic GFR-binding peptide
TNAISMLYFDNGRVLL

SEQ ID NO: 8690 - protein, 16 aa, Artificial Sequence
  Cyclic GFR-binding peptide
LNAISVLYFDSSNNVI

SEQ ID NO: 8691 - protein, 13 aa, Artificial Sequence
  Cyclic GFR-binding peptide
VPARLNAISILYF

SEQ ID NO: 8692 - protein, 13 aa, Artificial Sequence
  Cyclic GFR-binding peptide
VPTELNAISMLYF

SEQ ID NO: 8693 - protein, 16 aa, Artificial Sequence
  Cyclic GFR-binding peptide
  MOD_RES (2)..(3): Xaa is C or S
AXXAPTKLNAISVLYF

SEQ ID NO: 8694 - protein, 16 aa, Artificial Sequence
  Cyclic GFR-binding peptide
  MOD_RES (2)..(3): Xaa is C or S
AXXVPTKLNAISILYF

SEQ ID NO: 8695 - protein, 15 aa, Artificial Sequence
  Cyclic GFR-binding peptide
NAISILYFDKGVVTY

SEQ ID NO: 8696 - protein, 19 aa, Artificial Sequence
  Cyclic GFR-binding peptide
  MOD_RES (5)..(6): Xaa is C or S
SAGPXXTPTKMNAISMLYF

SEQ ID NO: 8697 - protein, 18 aa, Artificial Sequence
  Cyclic GFR-binding peptide
TELNAISMLYFDEYDKVV

SEQ ID NO: 8698 - protein, 18 aa, Artificial Sequence
  Cyclic GFR-binding peptide
TRLNAISILYFDSANNVV

SEQ ID NO: 8699 - protein, 19 aa, Artificial Sequence
  Cyclic GFR-binding peptide
PVKTNAISMLYFDNGRVLL

SEQ ID NO: 8700 - protein, 18 aa, Artificial Sequence
  Cyclic GFR-binding peptide
ARLNAISILYFDAANNVV

SEQ ID NO: 8701 - protein, 18 aa, Artificial Sequence
  Cyclic GFR-binding peptide
  MOD_RES (4)..(5): Xaa is C or S
SKAXXVPTKLNAISILYF

SEQ ID NO: 8702 - protein, 20 aa, Artificial Sequence
  Cyclic GFR-binding peptide
  MOD_RES (6)..(7): Xaa is C or S
GSAGPXXTPTKMNAISMLYF

SEQ ID NO: 8703 - protein, 15 aa, Artificial Sequence
  Cyclic GFR-binding peptide
  MOD_RES (1)..(2): Xaa is C or S
XXVPTKLNAISVLYF

SEQ ID NO: 8704 - protein, 15 aa, Artificial Sequence
  Cyclic GFR-binding peptide
  MOD_RES (1)..(2): Xaa is C or S
XXVPTRLNAISILYF

SEQ ID NO: 8705 - protein, 19 aa, Artificial Sequence
  Cyclic GFR-binding peptide
PARLNAISILYFDAANNVV

SEQ ID NO: 8706 - protein, 15 aa, Artificial Sequence
  Cyclic GFR-binding peptide
NAISVLYFDSSNNVI

SEQ ID NO: 8707 - protein, 19 aa, Artificial Sequence
  Cyclic GFR-binding peptide
  MOD_RES (5)..(6): Xaa is C or S
VGKAXXVPTKLNAISVLYF

SEQ ID NO: 8708 - protein, 17 aa, Artificial Sequence
  Cyclic GFR-binding peptide
  MOD_RES (3)..(4): Xaa is C or S
ASXXVPARLNAISILYF

SEQ ID NO: 8709 - protein, 20 aa, Artificial Sequence
  Cyclic GFR-binding peptide
  MOD_RES (6)..(7): Xaa is C or S
AVPKAXXAPTKLNAISVLYF

SEQ ID NO: 8710 - protein, 19 aa, Artificial Sequence
  Cyclic GFR-binding peptide
PTRLNAISILYFDSANNVV

SEQ ID NO: 8711 - protein, 14 aa, Artificial Sequence
  Cyclic GFR-binding peptide
  MOD_RES (1)..(1): Xaa is C or S
XVPARLNAISILYF

SEQ ID NO: 8712 - protein, 14 aa, Artificial Sequence
  Cyclic GFR-binding peptide
  MOD_RES (1)..(1): Xaa is C or S
XVPTELNAISMLYF

SEQ ID NO: 8713 - protein, 16 aa, Artificial Sequence
  Cyclic GFR-binding peptide
  MOD_RES (2)..(3): Xaa is C or S
AXXVPTKLNAISVLYF

SEQ ID NO: 8714 - protein, 13 aa, Artificial Sequence
  Cyclic GFR-binding peptide
TPTKMNAISMLYF

SEQ ID NO: 8715 - protein, 18 aa, Artificial Sequence
  Cyclic GFR-binding peptide
  MOD_RES (4)..(5): Xaa is C or S
PSTXXAPVKTNAISMLYF

SEQ ID NO: 8716 - protein, 20 aa, Artificial Sequence
  Cyclic GFR-binding peptide
  MOD_RES (6)..(7): Xaa is C or S
RVPSTXXAPVKTNAISMLYF

SEQ ID NO: 8717 - protein, 17 aa, Artificial Sequence
  Cyclic GFR-binding peptide
RLNAISILYFDAANNVV

SEQ ID NO: 8718 - protein, 19 aa, Artificial Sequence
  Cyclic GFR-binding peptide
  MOD_RES (5)..(6): Xaa is C or S
ASKAXXVPTKLNAISILYF

SEQ ID NO: 8719 - protein, 18 aa, Artificial Sequence
  Cyclic GFR-binding peptide
  MOD_RES (4)..(5): Xaa is C or S
PASXXVPARLNAISILYF

SEQ ID NO: 8720 - protein, 14 aa, Artificial Sequence
  Cyclic GFR-binding peptide
  MOD_RES (1)..(1): Xaa is C or S
XVPTKLNAISVLYF

SEQ ID NO: 8721 - protein, 14 aa, Artificial Sequence
  Cyclic GFR-binding peptide
  MOD_RES (1)..(1): Xaa is C or S
XVPTRLNAISILYF

SEQ ID NO: 8722 - protein, 16 aa, Artificial Sequence
  Cyclic GFR-binding peptide
  MOD_RES (2)..(3): Xaa is C or S
TXXAPVKTNAISMLYF

SEQ ID NO: 8723 - protein, 16 aa, Artificial Sequence
  Cyclic GFR-binding peptide
LNAISILYFDSANNVV

SEQ ID NO: 8724 - protein, 15 aa, Artificial Sequence
  Cyclic GFR-binding peptide
NAISMLYFDENEKVV

SEQ ID NO: 8725 - protein, 14 aa, Artificial Sequence
  Cyclic GFR-binding peptide
  MOD_RES (1)..(1): Xaa is C or S
XAPVKTNAISMLYF

SEQ ID NO: 8726 - protein, 18 aa, Artificial Sequence
  Cyclic GFR-binding peptide
  MOD_RES (4)..(5): Xaa is C or S
PKAXXVPTELNAISMLYF

SEQ ID NO: 8727 - protein, 27 aa, Artificial Sequence
  Cyclic GFR-binding peptide
  MOD_RES (6)..(7): Xaa is C or S
AAPASXXVPARLNAISILYFDAANNVV

SEQ ID NO: 8728 - protein, 13 aa, Artificial Sequence
  Cyclic GFR-binding peptide
APVKTNAISMLYF

SEQ ID NO: 8729 - protein, 14 aa, Artificial Sequence
  Cyclic GFR-binding peptide
  MOD_RES (1)..(1): Xaa is C or S
XTPTKMNAISMLYF

SEQ ID NO: 8730 - protein, 18 aa, Artificial Sequence
  Cyclic GFR-binding peptide
TKLNAISVLYFDDMGVPT

SEQ ID NO: 8731 - protein, 15 aa, Artificial Sequence
  Cyclic GFR-binding peptide
NAISMLYFDEYDKVV

SEQ ID NO: 8732 - protein, 19 aa, Artificial Sequence
  Cyclic GFR-binding peptide
PTKLNAISILYFDKGVVTY

SEQ ID NO: 8733 - protein, 17 aa, Artificial Sequence
  Cyclic GFR-binding peptide
KLNAISVLYFDDMGVPT

SEQ ID NO: 8734 - protein, 19 aa, Artificial Sequence
  Cyclic GFR-binding peptide
  MOD_RES (5)..(6): Xaa is C or S
VPSTXXAPVKTNAISMLYF

SEQ ID NO: 8735 - protein, 17 aa, Artificial Sequence
  Cyclic GFR-binding peptide
  MOD_RES (3)..(4): Xaa is C or S
KAXXVPTKLNAISILYF

SEQ ID NO: 8736 - protein, 17 aa, Artificial Sequence
  Cyclic GFR-binding peptide
KMNAISMLYFNDKQQII

SEQ ID NO: 8737 - protein, 27 aa, Artificial Sequence
  Cyclic GFR-binding peptide
  MOD_RES (6)..(7): Xaa is C or S
AVPKAXXAPTKLNAISVLYFDSSNNVI

SEQ ID NO: 8738 - protein, 15 aa, Artificial Sequence
  Cyclic GFR-binding peptide
NAISMLYFNDKQQII

SEQ ID NO: 8739 - protein, 18 aa, Artificial Sequence
  Cyclic GFR-binding peptide
  MOD_RES (4)..(5): Xaa is C or S
GKAXXVPTKLNAISVLYF

SEQ ID NO: 8740 - protein, 17 aa, Artificial Sequence
  Cyclic GFR-binding peptide
  MOD_RES (3)..(4): Xaa is C or S
PTXXVPTRLNAISILYF

SEQ ID NO: 8741 - protein, 15 aa, Artificial Sequence
  Cyclic GFR-binding peptide
  MOD_RES (1)..(2): Xaa is C or S
XXVPARLNAISILYF

SEQ ID NO: 8742 - protein, 17 aa, Artificial Sequence
  Cyclic GFR-binding peptide
  MOD_RES (3)..(4): Xaa is C or S
KAXXVPTELNAISMLYF

SEQ ID NO: 8743 - protein, 27 aa, Artificial Sequence
  Cyclic GFR-binding peptide
  MOD_RES (6)..(7): Xaa is C or S
GSAGPXXTPTKMNAISMLYFNDKQQII

SEQ ID NO: 8744 - protein, 16 aa, Artificial Sequence
  Cyclic GFR-binding peptide
LNAISILYFDAANNVV

SEQ ID NO: 8745 - protein, 18 aa, Artificial Sequence
  Cyclic GFR-binding peptide
TKMNAISMLYFNDKQQII

SEQ ID NO: 8746 - protein, 15 aa, Artificial Sequence
  Cyclic GFR-binding peptide
NAISMLYFDNGRVLL

SEQ ID NO: 8747 - protein, 17 aa, Artificial Sequence
  Cyclic GFR-binding peptide
  MOD_RES (3)..(4): Xaa is C or S
STXXAPVKTNAISMLYF

SEQ ID NO: 8748 - protein, 19 aa, Artificial Sequence
  Cyclic GFR-binding peptide
PTELNAISMLYFDEYDKVV

SEQ ID NO: 8749 - protein, 19 aa, Artificial Sequence
  Cyclic GFR-binding peptide
PTKLNAISVLYFDSSNNVI

SEQ ID NO: 8750 - protein, 15 aa, Artificial Sequence
  Cyclic GFR-binding peptide
IKPTKGIFYLISIAN

SEQ ID NO: 8751 - protein, 16 aa, Artificial Sequence
  Cyclic GFR-binding peptide
VVNNASDYYLISTASL

SEQ ID NO: 8752 - protein, 15 aa, Artificial Sequence
  Cyclic GFR-binding peptide
IVNSSDDKYLVSIPS

SEQ ID NO: 8753 - protein, 13 aa, Artificial Sequence
  Cyclic GFR-binding peptide
LYLISIPELDQPV

SEQ ID NO: 8754 - protein, 18 aa, Artificial Sequence
  Cyclic GFR-binding peptide
VVNKNEDFYLINIPSMKE

SEQ ID NO: 8755 - protein, 13 aa, Artificial Sequence
  Cyclic GFR-binding peptide
YYLISTASLRTPV

SEQ ID NO: 8756 - protein, 14 aa, Artificial Sequence
  Cyclic GFR-binding peptide
  MOD_RES (14)..(14): Xaa is C or S
FYLISIANLKTPVX

SEQ ID NO: 8757 - protein, 13 aa, Artificial Sequence
  Cyclic GFR-binding peptide
LYLMSIPELETPV

SEQ ID NO: 8758 - protein, 19 aa, Artificial Sequence
  Cyclic GFR-binding peptide
YTVVGKDYYLISTASLKTP

SEQ ID NO: 8759 - protein, 19 aa, Artificial Sequence
  Cyclic GFR-binding peptide
  MOD_RES (14)..(15): Xaa is C or S
KYLISIPSLRAPVXXSAPA

SEQ ID NO: 8760 - protein, 14 aa, Artificial Sequence
  Cyclic GFR-binding peptide
  MOD_RES (14)..(14): Xaa is C or S
LYLISIPELDQSVX

SEQ ID NO: 8761 - protein, 19 aa, Artificial Sequence
  Cyclic GFR-binding peptide
IIQQKDNFYLMNIPSMKTP

SEQ ID NO: 8762 - protein, 17 aa, Artificial Sequence
  Cyclic GFR-binding peptide
VVNNAADKYLISIPSLR

SEQ ID NO: 8763 - protein, 17 aa, Artificial Sequence
  Cyclic GFR-binding peptide
VKPTRGVKYLISIPSLD

SEQ ID NO: 8764 - protein, 14 aa, Artificial Sequence
  Cyclic GFR-binding peptide
  MOD_RES (14)..(14): Xaa is C or S
YYLISTASMKEPVX

SEQ ID NO: 8765 - protein, 17 aa, Artificial Sequence
  Cyclic GFR-binding peptide
  MOD_RES (14)..(15): Xaa is C or S
FYLVNIPSLKTPAXXAK

SEQ ID NO: 8766 - protein, 19 aa, Artificial Sequence
  Cyclic GFR-binding peptide
VVNNAADKYLISIPSLRAP

SEQ ID NO: 8767 - protein, 15 aa, Artificial Sequence
  Cyclic GFR-binding peptide
  MOD_RES (14)..(15): Xaa is C or S
FYLMNIPSLETPVXX

SEQ ID NO: 8768 - protein, 16 aa, Artificial Sequence
  Cyclic GFR-binding peptide
  MOD_RES (14)..(15): Xaa is C or S
FYLINIPSLRTPVXXT

SEQ ID NO: 8769 - protein, 18 aa, Artificial Sequence
  Cyclic GFR-binding peptide
  MOD_RES (14)..(15): Xaa is C or S
FYLINIPSMKEPVXXPEP

SEQ ID NO: 8770 - protein, 20 aa, Artificial Sequence
  Cyclic GFR-binding peptide
  MOD_RES (14)..(15): Xaa is C or S
KYLMSIPSMKTPTXXPGASG

SEQ ID NO: 8771 - protein, 16 aa, Artificial Sequence
  Cyclic GFR-binding peptide
  MOD_RES (14)..(14): Xaa is C or S
LYLVSIPELKTPAXTP

SEQ ID NO: 8772 - protein, 16 aa, Artificial Sequence
  Cyclic GFR-binding peptide
  MOD_RES (14)..(15): Xaa is C or S
YYLVSTASLQTPAXXP

SEQ ID NO: 8773 - protein, 16 aa, Artificial Sequence
  Cyclic GFR-binding peptide
  MOD_RES (14)..(15): Xaa is C or S
YYLISTASLAQPVXXP

SEQ ID NO: 8774 - protein, 19 aa, Artificial Sequence
  Cyclic GFR-binding peptide
VVKENEDFYLMNIPSLETP

SEQ ID NO: 8775 - protein, 27 aa, Artificial Sequence
  Cyclic GFR-binding peptide
  MOD_RES (21)..(22): Xaa is C or S
VKPTRGVFYLINIPSLDQPVXXPSASA

SEQ ID NO: 8776 - protein, 19 aa, Artificial Sequence
  Cyclic GFR-binding peptide
IVNSSDDLYLVSIPELKTP

SEQ ID NO: 8777 - protein, 14 aa, Artificial Sequence
  Cyclic GFR-binding peptide
  MOD_RES (14)..(14): Xaa is C or S
KYLISIPSLKTPVX

SEQ ID NO: 8778 - protein, 18 aa, Artificial Sequence
  Cyclic GFR-binding peptide
VVNNAADLYLISIPELRA

SEQ ID NO: 8779 - protein, 20 aa, Artificial Sequence
  Cyclic GFR-binding peptide
  MOD_RES (14)..(15): Xaa is C or S
FYLVNIPSLKTPVXXAKGVK

SEQ ID NO: 8780 - protein, 18 aa, Artificial Sequence
  Cyclic GFR-binding peptide
YTVVGKDFYLISIANLKT

SEQ ID NO: 8781 - protein, 18 aa, Artificial Sequence
  Cyclic GFR-binding peptide
  MOD_RES (14)..(15): Xaa is C or S
YYLISTASLDQPVXXPSA

SEQ ID NO: 8782 - protein, 18 aa, Artificial Sequence
  Cyclic GFR-binding peptide
  MOD_RES (14)..(15): Xaa is C or S
YYLISTASLAQPVXXPAA

SEQ ID NO: 8783 - protein, 18 aa, Artificial Sequence
  Cyclic GFR-binding peptide
VVNNASDYYLISTASLRT

SEQ ID NO: 8784 - protein, 18 aa, Artificial Sequence
  Cyclic GFR-binding peptide
  MOD_RES (14)..(14): Xaa is C or S
FYLVNIPSLKTPAXTPKT

SEQ ID NO: 8785 - protein, 18 aa, Artificial Sequence
  Cyclic GFR-binding peptide
  MOD_RES (14)..(15): Xaa is C or S
FYLVSIANLKTPAXXAKP

SEQ ID NO: 8786 - protein, 17 aa, Artificial Sequence
  Cyclic GFR-binding peptide
IVNSSDDFYLVSIANLQ

SEQ ID NO: 8787 - protein, 19 aa, Artificial Sequence
  Cyclic GFR-binding peptide
  MOD_RES (14)..(15): Xaa is C or S
YYLMSTASTKVPAXXTSPV

SEQ ID NO: 8788 - protein, 18 aa, Artificial Sequence
  Cyclic GFR-binding peptide
VVKENEDYYLMSTASLET

SEQ ID NO: 8789 - protein, 17 aa, Artificial Sequence
  Cyclic GFR-binding peptide
IVNSSDDFYLVSIANLK

SEQ ID NO: 8790 - protein, 19 aa, Artificial Sequence
  Cyclic GFR-binding peptide
VKPTRGVLYLISIPELDQP

SEQ ID NO: 8791 - protein, 17 aa, Artificial Sequence
  Cyclic GFR-binding peptide
  MOD_RES (14)..(15): Xaa is C or S
LYLISIPELDQSVXXPS

SEQ ID NO: 8792 - protein, 15 aa, Artificial Sequence
  Cyclic GFR-binding peptide
VVNNASDFYLISIAN

SEQ ID NO: 8793 - protein, 16 aa, Artificial Sequence
  Cyclic GFR-binding peptide
  MOD_RES (14)..(15): Xaa is C or S
KYLISIPSMKEPVXXP

SEQ ID NO: 8794 - protein, 17 aa, Artificial Sequence
  Cyclic GFR-binding peptide
  MOD_RES (14)..(15): Xaa is C or S
FYLVNIPSLQTPAXXPK

SEQ ID NO: 8795 - protein, 15 aa, Artificial Sequence
  Cyclic GFR-binding peptide
IIQQKDNKYLMSIPS

SEQ ID NO: 8796 - protein, 27 aa, Artificial Sequence
  Cyclic GFR-binding peptide
  MOD_RES (21)..(22): Xaa is C or S
IIQQKDNKYLMSIPSMKTPTXXPGASG

SEQ ID NO: 8797 - protein, 16 aa, Artificial Sequence
  Cyclic GFR-binding peptide
  MOD_RES (14)..(15): Xaa is C or S
FYLISIANLRAPVXXS

SEQ ID NO: 8798 - protein, 27 aa, Artificial Sequence
  Cyclic GFR-binding peptide
  MOD_RES (21)..(22): Xaa is C or S
IVNSSDDFYLVSIANLKTPAXXPKPVH

SEQ ID NO: 8799 - protein, 27 aa, Artificial Sequence
  Cyclic GFR-binding peptide
  MOD_RES (21)..(22): Xaa is C or S
VVNKNEDKYLISIPSMKEPVXXPEPIG

SEQ ID NO: 8800 - protein, 18 aa, Artificial Sequence
  Cyclic GFR-binding peptide
  MOD_RES (14)..(15): Xaa is C or S
FYLMNIPSTKVPAXXTSP

SEQ ID NO: 8801 - protein, 19 aa, Artificial Sequence
  Cyclic GFR-binding peptide
  MOD_RES (14)..(15): Xaa is C or S
FYLISIANLRAPVXXSAPA

SEQ ID NO: 8802 - protein, 16 aa, Artificial Sequence
  Cyclic GFR-binding peptide
VVNKNEDFYLINIPSM

SEQ ID NO: 8803 - protein, 15 aa, Artificial Sequence
  Cyclic GFR-binding peptide
YTVVGKDFYLINIPS

SEQ ID NO: 8804 - protein, 18 aa, Artificial Sequence
  Cyclic GFR-binding peptide
  MOD_RES (14)..(15): Xaa is C or S
FYLVSIANLQTPAXXPKP

SEQ ID NO: 8805 - protein, 17 aa, Artificial Sequence
  Cyclic GFR-binding peptide
  MOD_RES (14)..(14): Xaa is C or S
LYLVSIPELKTPAXTPK

SEQ ID NO: 8806 - protein, 17 aa, Artificial Sequence
  Cyclic GFR-binding peptide
VKPKRGVLYLISIPELA

SEQ ID NO: 8807 - protein, 16 aa, Artificial Sequence
  Cyclic GFR-binding peptide
  MOD_RES (14)..(15): Xaa is C or S
KYLISIPSLRAPVXXS

SEQ ID NO: 8808 - protein, 15 aa, Artificial Sequence
  Cyclic GFR-binding peptide
  MOD_RES (14)..(15): Xaa is C or S
YYLISTASLRAPVXX

SEQ ID NO: 8809 - protein, 18 aa, Artificial Sequence
  Cyclic GFR-binding peptide
LLVRGNDYYLMSTASTKV

SEQ ID NO: 8810 - protein, 17 aa, Artificial Sequence
  Cyclic GFR-binding peptide
  MOD_RES (14)..(15): Xaa is C or S
LYLVSIPELKTPAXXAK

SEQ ID NO: 8811 - protein, 20 aa, Artificial Sequence
  Cyclic GFR-binding peptide
  MOD_RES (14)..(15): Xaa is C or S
FYLVSIANLKTPAXXPKPVH

SEQ ID NO: 8812 - protein, 14 aa, Artificial Sequence
  Cyclic GFR-binding peptide
  MOD_RES (14)..(14): Xaa is C or S
YYLISTASLRAPVX

SEQ ID NO: 8813 - protein, 15 aa, Artificial Sequence
  Cyclic GFR-binding peptide
VKPKRGVFYLISIAN

SEQ ID NO: 8814 - protein, 18 aa, Artificial Sequence
  Cyclic GFR-binding peptide
VVNNASDFYLISIANLRT

SEQ ID NO: 8815 - protein, 14 aa, Artificial Sequence
  Cyclic GFR-binding peptide
  MOD_RES (14)..(14): Xaa is C or S
FYLINIPSLDQPVX

SEQ ID NO: 8816 - protein, 19 aa, Artificial Sequence
  Cyclic GFR-binding peptide
LLVRGNDFYLMNIPSTKVP

SEQ ID NO: 8817 - protein, 15 aa, Artificial Sequence
  Cyclic GFR-binding peptide
IVNSSDDLYLVSIPE

SEQ ID NO: 8818 - protein, 20 aa, Artificial Sequence
  Cyclic GFR-binding peptide
  MOD_RES (14)..(15): Xaa is C or S
FYLMSIANMKTPTXXPGASG

SEQ ID NO: 8819 - protein, 15 aa, Artificial Sequence
  Cyclic GFR-binding peptide
  MOD_RES (14)..(15): Xaa is C or S
LYLMSIPELETPVXX

SEQ ID NO: 8820 - protein, 16 aa, Artificial Sequence
  Cyclic GFR-binding peptide
  MOD_RES (14)..(14): Xaa is C or S
FYLVNIPSLKTPAXTP

SEQ ID NO: 8821 - protein, 17 aa, Artificial Sequence
  Cyclic GFR-binding peptide
VKPTRGVLYLISIPELD

SEQ ID NO: 8822 - protein, 19 aa, Artificial Sequence
  Cyclic GFR-binding peptide
VVNNAADFYLISIANLRAP

SEQ ID NO: 8823 - protein, 16 aa, Artificial Sequence
  Cyclic GFR-binding peptide
VKPTRGVFYLINIPSL

SEQ ID NO: 8824 - protein, 17 aa, Artificial Sequence
  Cyclic GFR-binding peptide
  MOD_RES (14)..(15): Xaa is C or S
FYLINIPSLAQPVXXPA

SEQ ID NO: 8825 - protein, 15 aa, Artificial Sequence
  Cyclic GFR-binding peptide
  MOD_RES (14)..(15): Xaa is C or S
LYLISIPELDQPVXX

SEQ ID NO: 8826 - protein, 16 aa, Artificial Sequence
  Cyclic GFR-binding peptide
IKPTKGIYYLISTASL

SEQ ID NO: 8827 - protein, 20 aa, Artificial Sequence
  Cyclic GFR-binding peptide
  MOD_RES (14)..(15): Xaa is C or S
FYLVSIANLKTPAXXAKPVA

SEQ ID NO: 8828 - protein, 14 aa, Artificial Sequence
  Cyclic GFR-binding peptide
  MOD_RES (14)..(14): Xaa is C or S
LYLVSIPELQTPAX

SEQ ID NO: 8829 - protein, 17 aa, Artificial Sequence
  Cyclic GFR-binding peptide
  MOD_RES (14)..(15): Xaa is C or S
YYLMSTASMKTPTXXPG

SEQ ID NO: 8830 - protein, 17 aa, Artificial Sequence
  Cyclic GFR-binding peptide
VVNNAADFYLISIANLR

SEQ ID NO: 8831 - protein, 19 aa, Artificial Sequence
  Cyclic GFR-binding peptide
LLVRGNDYYLMSTASTKVP

SEQ ID NO: 8832 - protein, 19 aa, Artificial Sequence
  Cyclic GFR-binding peptide
  MOD_RES (14)..(15): Xaa is C or S
LYLISIPELAQPVXXPAAS

SEQ ID NO: 8833 - protein, 17 aa, Artificial Sequence
  Cyclic GFR-binding peptide
IVNNSSDLYLVSIPELK

SEQ ID NO: 8834 - protein, 15 aa, Artificial Sequence
  Cyclic GFR-binding peptide
IVNSSDDFYLVSIAN

SEQ ID NO: 8835 - protein, 15 aa, Artificial Sequence
  Cyclic GFR-binding peptide
VKPKRGVYYLISTAS

SEQ ID NO: 8836 - protein, 18 aa, Artificial Sequence
  Cyclic GFR-binding peptide
  MOD_RES (14)..(15): Xaa is C or S
FYLINIPSLRAPVXXSAP

SEQ ID NO: 8837 - protein, 17 aa, Artificial Sequence
  Cyclic GFR-binding peptide
  MOD_RES (14)..(15): Xaa is C or S
FYLINIPSLDQPVXXPS

SEQ ID NO: 8838 - protein, 15 aa, Artificial Sequence
  Cyclic GFR-binding peptide
  MOD_RES (14)..(15): Xaa is C or S
LYLMSIPEMKTPTXX

SEQ ID NO: 8839 - protein, 15 aa, Artificial Sequence
  Cyclic GFR-binding peptide
IKPTKGIYYLISTAS

SEQ ID NO: 8840 - protein, 13 aa, Artificial Sequence
  Cyclic GFR-binding peptide
LYLMSIPEMKTPT

SEQ ID NO: 8841 - protein, 15 aa, Artificial Sequence
  Cyclic GFR-binding peptide
  MOD_RES (14)..(14): Xaa is C or S
YYLVSTASLKTPAXT

SEQ ID NO: 8842 - protein, 27 aa, Artificial Sequence
  Cyclic GFR-binding peptide
  MOD_RES (21)..(22): Xaa is C or S
VVKENEDLYLMSIPELETPVXXAKPIK

SEQ ID NO: 8843 - protein, 20 aa, Artificial Sequence
  Cyclic GFR-binding peptide
  MOD_RES (14)..(15): Xaa is C or S
KYLVSIPSLKTPAXXPKPVH

SEQ ID NO: 8844 - protein, 16 aa, Artificial Sequence
  Cyclic GFR-binding peptide
IVNNSSDLYLVSIPEL

SEQ ID NO: 8845 - protein, 19 aa, Artificial Sequence
  Cyclic GFR-binding peptide
YTVVGKDFYLISIANLKTP

SEQ ID NO: 8846 - protein, 16 aa, Artificial Sequence
  Cyclic GFR-binding peptide
  MOD_RES (14)..(15): Xaa is C or S
LYLVSIPELKTPAXXP

SEQ ID NO: 8847 - protein, 27 aa, Artificial Sequence
  Cyclic GFR-binding peptide
  MOD_RES (21)..(22): Xaa is C or S
IVNNSSDYYLVSTASLKTPAXXAKPVA

SEQ ID NO: 8848 - protein, 27 aa, Artificial Sequence
  Cyclic GFR-binding peptide
  MOD_RES (21)..(22): Xaa is C or S
VVKDYEDKYLMSIPSLETPVXXAKPIS

SEQ ID NO: 8849 - protein, 27 aa, Artificial Sequence
  Cyclic GFR-binding peptide
  MOD_RES (21)..(22): Xaa is C or S
VVNNAADLYLISIPELRAPVXXSAPAA

SEQ ID NO: 8850 - protein, 17 aa, Artificial Sequence
  Cyclic GFR-binding peptide
YTVVGKDFYLINIPSLK

SEQ ID NO: 8851 - protein, 27 aa, Artificial Sequence
  Cyclic GFR-binding peptide
  MOD_RES (21)..(22): Xaa is C or S
IVNNSSDFYLVSIANLKTPAXXAKPVA

SEQ ID NO: 8852 - protein, 15 aa, Artificial Sequence
  Cyclic GFR-binding peptide
VVNNASDKYLISIPS

SEQ ID NO: 8853 - protein, 20 aa, Artificial Sequence
  Cyclic GFR-binding peptide
  MOD_RES (14)..(15): Xaa is C or S
YYLMSTASLETPVXXAKPIS

SEQ ID NO: 8854 - protein, 17 aa, Artificial Sequence
  Cyclic GFR-binding peptide
VKPTRGVFYLISIANLD

SEQ ID NO: 8855 - protein, 17 aa, Artificial Sequence
  Cyclic GFR-binding peptide
  MOD_RES (14)..(15): Xaa is C or S
FYLMSIANLETPVXXAK

SEQ ID NO: 8856 - protein, 15 aa, Artificial Sequence
  Cyclic GFR-binding peptide
LLVRGNDYYLMSTAS

SEQ ID NO: 8857 - protein, 17 aa, Artificial Sequence
  Cyclic GFR-binding peptide
IVNSSDDKYLVSIPSLQ

SEQ ID NO: 8858 - protein, 16 aa, Artificial Sequence
  Cyclic GFR-binding peptide
YTVVGKDFYLINIPSL

SEQ ID NO: 8859 - protein, 19 aa, Artificial Sequence
  Cyclic GFR-binding peptide
VVNNAADLYLISIPELRAP

SEQ ID NO: 8860 - protein, 19 aa, Artificial Sequence
  Cyclic GFR-binding peptide
VKPKRGVLYLISIPELAQP

SEQ ID NO: 8861 - protein, 19 aa, Artificial Sequence
  Cyclic GFR-binding peptide
  MOD_RES (14)..(15): Xaa is C or S
LYLISIPELDQPVXXPSAS

SEQ ID NO: 8862 - protein, 17 aa, Artificial Sequence
  Cyclic GFR-binding peptide
IVNSSDDKYLVSIPSLK

SEQ ID NO: 8863 - protein, 19 aa, Artificial Sequence
  Cyclic GFR-binding peptide
TPVGMDDFYLVNIPSLKTP

SEQ ID NO: 8864 - protein, 20 aa, Artificial Sequence
  Cyclic GFR-binding peptide
  MOD_RES (14)..(15): Xaa is C or S
LYLVSIPELKTPVXXAKGVK

SEQ ID NO: 8865 - protein, 27 aa, Artificial Sequence
  Cyclic GFR-binding peptide
  MOD_RES (21)..(22): Xaa is C or S
IVNSSDDFYLVNIPSLKTPAXXPKPVY

SEQ ID NO: 8866 - protein, 17 aa, Artificial Sequence
  Cyclic GFR-binding peptide
  MOD_RES (14)..(15): Xaa is C or S
FYLVNIPSLKTPVXXAK

SEQ ID NO: 8867 - protein, 15 aa, Artificial Sequence
  Cyclic GFR-binding peptide
LLVRGNDFYLMSIAN

SEQ ID NO: 8868 - protein, 17 aa, Artificial Sequence
  Cyclic GFR-binding peptide
  MOD_RES (14)..(15): Xaa is C or S
KYLMSIPSLETPVXXAK

SEQ ID NO: 8869 - protein, 18 aa, Artificial Sequence
  Cyclic GFR-binding peptide
IIQQKDNYYLMSTASMKT

SEQ ID NO: 8870 - protein, 17 aa, Artificial Sequence
  Cyclic GFR-binding peptide
  MOD_RES (14)..(15): Xaa is C or S
LYLISIPELAQPVXXPA

SEQ ID NO: 8871 - protein, 20 aa, Artificial Sequence
  Cyclic GFR-binding peptide
  MOD_RES (14)..(15): Xaa is C or S
KYLVSIPSLQTPAXXPKPVT

SEQ ID NO: 8872 - protein, 16 aa, Artificial Sequence
  Cyclic GFR-binding peptide
  MOD_RES (14)..(15): Xaa is C or S
FYLMNIPSLETPVXXA

SEQ ID NO: 8873 - protein, 15 aa, Artificial Sequence
  Cyclic GFR-binding peptide
  MOD_RES (14)..(15): Xaa is C or S
YYLMSTASTKVPAXX

SEQ ID NO: 8874 - protein, 19 aa, Artificial Sequence
  Cyclic GFR-binding peptide
  MOD_RES (14)..(15): Xaa is C or S
FYLINIPSLDQPVXXPSAS

SEQ ID NO: 8875 - protein, 18 aa, Artificial Sequence
  Cyclic GFR-binding peptide
YTVVGKDLYLISIPELKT

SEQ ID NO: 8876 - protein, 20 aa, Artificial Sequence
  Cyclic GFR-binding peptide
  MOD_RES (14)..(15): Xaa is C or S
YYLISTASMKEPVXXPEPIG

SEQ ID NO: 8877 - protein, 14 aa, Artificial Sequence
  Cyclic GFR-binding peptide
  MOD_RES (14)..(14): Xaa is C or S
FYLINIPSLAQPVX

SEQ ID NO: 8878 - protein, 17 aa, Artificial Sequence
  Cyclic GFR-binding peptide
  MOD_RES (14)..(15): Xaa is C or S
YYLISTASLRTPVXXTP

SEQ ID NO: 8879 - protein, 27 aa, Artificial Sequence
  Cyclic GFR-binding peptide
  MOD_RES (21)..(22): Xaa is C or S
IVNSSDDYYLVSTASLQTPAXXPKPVT

SEQ ID NO: 8880 - protein, 16 aa, Artificial Sequence
  Cyclic GFR-binding peptide
VKPKRGVYYLISTASL

SEQ ID NO: 8881 - protein, 20 aa, Artificial Sequence
  Cyclic GFR-binding peptide
  MOD_RES (14)..(15): Xaa is C or S
KYLVSIPSLKTPAXXAKPVA

SEQ ID NO: 8882 - protein, 27 aa, Artificial Sequence
  Cyclic GFR-binding peptide
  MOD_RES (21)..(21): Xaa is C or S
IVNSSDDLYLVSIPELKTPAXTPKTVH

SEQ ID NO: 8883 - protein, 14 aa, Artificial Sequence
  Cyclic GFR-binding peptide
  MOD_RES (14)..(14): Xaa is C or S
FYLVSIANLKTPAX

SEQ ID NO: 8884 - protein, 27 aa, Artificial Sequence
  Cyclic GFR-binding peptide
  MOD_RES (21)..(22): Xaa is C or S
VVKDYEDFYLMSIANLETPVXXAKPIS

SEQ ID NO: 8885 - protein, 18 aa, Artificial Sequence
  Cyclic GFR-binding peptide
  MOD_RES (14)..(15): Xaa is C or S
LYLMSIPETKVPAXXTSP

SEQ ID NO: 8886 - protein, 17 aa, Artificial Sequence
  Cyclic GFR-binding peptide
IVNSSDDLYLVSIPELK

SEQ ID NO: 8887 - protein, 17 aa, Artificial Sequence
  Cyclic GFR-binding peptide
IVNSSDDLYLVSIPELQ

SEQ ID NO: 8888 - protein, 17 aa, Artificial Sequence
  Cyclic GFR-binding peptide
VVNNASDFYLINIPSLR

SEQ ID NO: 8889 - protein, 19 aa, Artificial Sequence
  Cyclic GFR-binding peptide
VKPTRGVKYLISIPSLDQP

SEQ ID NO: 8890 - protein, 20 aa, Artificial Sequence
  Cyclic GFR-binding peptide
  MOD_RES (14)..(15): Xaa is C or S
LYLVSIPELQTPAXXPKPVT

SEQ ID NO: 8891 - protein, 27 aa, Artificial Sequence
  Cyclic GFR-binding peptide
  MOD_RES (21)..(22): Xaa is C or S
LLVRGNDLYLMSIPETKVPAXXTSPVR

SEQ ID NO: 8892 - protein, 20 aa, Artificial Sequence
  Cyclic GFR-binding peptide
  MOD_RES (14)..(15): Xaa is C or S
YYLISTASLRAPVXXSAPAA

SEQ ID NO: 8893 - protein, 15 aa, Artificial Sequence
  Cyclic GFR-binding peptide
VVNNASDLYLISIPE

SEQ ID NO: 8894 - protein, 19 aa, Artificial Sequence
  Cyclic GFR-binding peptide
  MOD_RES (14)..(15): Xaa is C or S
LYLVSIPELQTPAXXPKPV

SEQ ID NO: 8895 - protein, 19 aa, Artificial Sequence
  Cyclic GFR-binding peptide
VVNKNEDFYLINIPSMKEP

SEQ ID NO: 8896 - protein, 16 aa, Artificial Sequence
  Cyclic GFR-binding peptide
  MOD_RES (14)..(15): Xaa is C or S
FYLMNIPSTKVPAXXT

SEQ ID NO: 8897 - protein, 19 aa, Artificial Sequence
  Cyclic GFR-binding peptide
  MOD_RES (14)..(15): Xaa is C or S
KYLISIPSLDQSVXXPSAS

SEQ ID NO: 8898 - protein, 18 aa, Artificial Sequence
  Cyclic GFR-binding peptide
  MOD_RES (14)..(15): Xaa is C or S
FYLINIPSLDQSVXXPSA

SEQ ID NO: 8899 - protein, 19 aa, Artificial Sequence
  Cyclic GFR-binding peptide
  MOD_RES (14)..(14): Xaa is C or S
FYLVSIANLKTPAXTPKTV

SEQ ID NO: 8900 - protein, 27 aa, Artificial Sequence
  Cyclic GFR-binding peptide
  MOD_RES (21)..(22): Xaa is C or S
VVKENEDKYLMSIPSLETPVXXAKPIK

SEQ ID NO: 8901 - protein, 18 aa, Artificial Sequence
  Cyclic GFR-binding peptide
  MOD_RES (14)..(15): Xaa is C or S
KYLISIPSLRTPVXXTPP

SEQ ID NO: 8902 - protein, 19 aa, Artificial Sequence
  Cyclic GFR-binding peptide
IVNSSDDKYLVSIPSLKTP

SEQ ID NO: 8903 - protein, 15 aa, Artificial Sequence
  Cyclic GFR-binding peptide
VKPTRGVFYLINIPS

SEQ ID NO: 8904 - protein, 16 aa, Artificial Sequence
  Cyclic GFR-binding peptide
  MOD_RES (14)..(15): Xaa is C or S
FYLVNIPSLKTPAXXP

SEQ ID NO: 8905 - protein, 18 aa, Artificial Sequence
  Cyclic GFR-binding peptide
VVNNASDKYLISIPSLRT

SEQ ID NO: 8906 - protein, 17 aa, Artificial Sequence
  Cyclic GFR-binding peptide
VKPKRGVKYLISIPSLA

SEQ ID NO: 8907 - protein, 19 aa, Artificial Sequence
  Cyclic GFR-binding peptide
  MOD_RES (14)..(15): Xaa is C or S
FYLVNIPSLKTPAXXAKPV

SEQ ID NO: 8908 - protein, 15 aa, Artificial Sequence
  Cyclic GFR-binding peptide
IVNNSSDLYLVSIPE

SEQ ID NO: 8909 - protein, 16 aa, Artificial Sequence
  Cyclic GFR-binding peptide
  MOD_RES (14)..(15): Xaa is C or S
KYLMSIPSMKTPTXXP

SEQ ID NO: 8910 - protein, 20 aa, Artificial Sequence
  Cyclic GFR-binding peptide
  MOD_RES (14)..(15): Xaa is C or S
FYLMSIANLETPVXXAKPIK

SEQ ID NO: 8911 - protein, 16 aa, Artificial Sequence
  Cyclic GFR-binding peptide
LLVRGNDKYLMSIPST

SEQ ID NO: 8912 - protein, 19 aa, Artificial Sequence
  Cyclic GFR-binding peptide
YTVVGKDFYLINIPSLKTP

SEQ ID NO: 8913 - protein, 14 aa, Artificial Sequence
  Cyclic GFR-binding peptide
  MOD_RES (14)..(14): Xaa is C or S
YYLISTASLRTPVX

SEQ ID NO: 8914 - protein, 15 aa, Artificial Sequence
  Cyclic GFR-binding peptide
  MOD_RES (14)..(15): Xaa is C or S
FYLVSIANLQTPAXX

SEQ ID NO: 8915 - protein, 13 aa, Artificial Sequence
  Cyclic GFR-binding peptide
YYLMSTASTKVPA

SEQ ID NO: 8916 - protein, 19 aa, Artificial Sequence
  Cyclic GFR-binding peptide
IVNSSDDKYLVSIPSLQTP

SEQ ID NO: 8917 - protein, 13 aa, Artificial Sequence
  Cyclic GFR-binding peptide
FYLISIANLKTPV

SEQ ID NO: 8918 - protein, 14 aa, Artificial Sequence
  Cyclic GFR-binding peptide
  MOD_RES (14)..(14): Xaa is C or S
LYLMSIPEMKTPTX

SEQ ID NO: 8919 - protein, 27 aa, Artificial Sequence
  Cyclic GFR-binding peptide
  MOD_RES (21)..(22): Xaa is C or S
VKPKRGVKYLISIPSLAQPVXXPAASA

SEQ ID NO: 8920 - protein, 18 aa, Artificial Sequence
  Cyclic GFR-binding peptide
  MOD_RES (14)..(15): Xaa is C or S
FYLMSIANMKTPTXXPGA

SEQ ID NO: 8921 - protein, 15 aa, Artificial Sequence
  Cyclic GFR-binding peptide
  MOD_RES (14)..(15): Xaa is C or S
FYLISIANLKTPVXX

SEQ ID NO: 8922 - protein, 17 aa, Artificial Sequence
  Cyclic GFR-binding peptide
IIQQKDNFYLMNIPSMK

SEQ ID NO: 8923 - protein, 15 aa, Artificial Sequence
  Cyclic GFR-binding peptide
  MOD_RES (14)..(15): Xaa is C or S
FYLISIANLAQPVXX

SEQ ID NO: 8924 - protein, 17 aa, Artificial Sequence
  Cyclic GFR-binding peptide
YTVVGKDYYLISTASLK

SEQ ID NO: 8925 - protein, 13 aa, Artificial Sequence
  Cyclic GFR-binding peptide
FYLVSIANLQTPA

SEQ ID NO: 8926 - protein, 13 aa, Artificial Sequence
  Cyclic GFR-binding peptide
FYLISIANLAQPV

SEQ ID NO: 8927 - protein, 18 aa, Artificial Sequence
  Cyclic GFR-binding peptide
LLVRGNDFYLMSIANTKV

SEQ ID NO: 8928 - protein, 18 aa, Artificial Sequence
  Cyclic GFR-binding peptide
  MOD_RES (14)..(15): Xaa is C or S
FYLVNIPSLKTPAXXPKP

SEQ ID NO: 8929 - protein, 16 aa, Artificial Sequence
  Cyclic GFR-binding peptide
VVNNAADLYLISIPEL

SEQ ID NO: 8930 - protein, 19 aa, Artificial Sequence
  Cyclic GFR-binding peptide
VKPKRGVKYLISIPSLAQP

SEQ ID NO: 8931 - protein, 19 aa, Artificial Sequence
  Cyclic GFR-binding peptide
VVNNASDFYLINIPSLRTP

SEQ ID NO: 8932 - protein, 16 aa, Artificial Sequence
  Cyclic GFR-binding peptide
LLVRGNDFYLMSIANT

SEQ ID NO: 8933 - protein, 14 aa, Artificial Sequence
  Cyclic GFR-binding peptide
  MOD_RES (14)..(14): Xaa is C or S
YYLMSTASLETPVX

SEQ ID NO: 8934 - protein, 18 aa, Artificial Sequence
  Cyclic GFR-binding peptide
YTVVGKDKYLISIPSLKT

SEQ ID NO: 8935 - protein, 27 aa, Artificial Sequence
  Cyclic GFR-binding peptide
  MOD_RES (21)..(22): Xaa is C or S
VKPKRGVLYLISIPELAQPVXXPAASA

SEQ ID NO: 8936 - protein, 19 aa, Artificial Sequence
  Cyclic GFR-binding peptide
IVNSSDDFYLVSIANLKTP

SEQ ID NO: 8937 - protein, 15 aa, Artificial Sequence
  Cyclic GFR-binding peptide
YTVVGKDFYLISIAN

SEQ ID NO: 8938 - protein, 17 aa, Artificial Sequence
  Cyclic GFR-binding peptide
VKPKRGVFYLISIANLA

SEQ ID NO: 8939 - protein, 27 aa, Artificial Sequence
  Cyclic GFR-binding peptide
  MOD_RES (21)..(22): Xaa is C or S
IIQQKDNYYLMSTASMKTPTXXPGASG

SEQ ID NO: 8940 - protein, 16 aa, Artificial Sequence
  Cyclic GFR-binding peptide
  MOD_RES (14)..(15): Xaa is C or S
YYLISTASLDQPVXXP

SEQ ID NO: 8941 - protein, 16 aa, Artificial Sequence
  Cyclic GFR-binding peptide
IVNSSDDFYLVNIPSL

SEQ ID NO: 8942 - protein, 18 aa, Artificial Sequence
  Cyclic GFR-binding peptide
  MOD_RES (14)..(15): Xaa is C or S
YYLISTASLKTPVXXAKS

SEQ ID NO: 8943 - protein, 16 aa, Artificial Sequence
  Cyclic GFR-binding peptide
VKPTRGVYYLISTASL

SEQ ID NO: 8944 - protein, 18 aa, Artificial Sequence
  Cyclic GFR-binding peptide
TPVGMDDYYLVSTASLKT

SEQ ID NO: 8945 - protein, 18 aa, Artificial Sequence
  Cyclic GFR-binding peptide
  MOD_RES (14)..(15): Xaa is C or S
YYLVSTASLKTPVXXAKG

SEQ ID NO: 8946 - protein, 16 aa, Artificial Sequence
  Cyclic GFR-binding peptide
  MOD_RES (14)..(15): Xaa is C or S
FYLISIANMKEPVXXP

SEQ ID NO: 8947 - protein, 15 aa, Artificial Sequence
  Cyclic GFR-binding peptide
LLVRGNDKYLMSIPS

SEQ ID NO: 8948 - protein, 27 aa, Artificial Sequence
  Cyclic GFR-binding peptide
  MOD_RES (21)..(22): Xaa is C or S
IVNNSSDKYLVSIPSLKTPAXXAKPVA

SEQ ID NO: 8949 - protein, 27 aa, Artificial Sequence
  Cyclic GFR-binding peptide
  MOD_RES (21)..(22): Xaa is C or S
IVNSSDDLYLVSIPELKTPAXXPKPVH

SEQ ID NO: 8950 - protein, 16 aa, Artificial Sequence
  Cyclic GFR-binding peptide
  MOD_RES (14)..(15): Xaa is C or S
YYLISTASLDQSVXXP

SEQ ID NO: 8951 - protein, 16 aa, Artificial Sequence
  Cyclic GFR-binding peptide
IVNSSDDFYLVSIANL

SEQ ID NO: 8952 - protein, 20 aa, Artificial Sequence
  Cyclic GFR-binding peptide
  MOD_RES (14)..(15): Xaa is C or S
KYLISIPSLRTPVXXTPPTS

SEQ ID NO: 8953 - protein, 20 aa, Artificial Sequence
  Cyclic GFR-binding peptide
  MOD_RES (14)..(15): Xaa is C or S
KYLISIPSLDQPVXXPSASA

SEQ ID NO: 8954 - protein, 15 aa, Artificial Sequence
  Cyclic GFR-binding peptide
VKPKRGVFYLINIPS

SEQ ID NO: 8955 - protein, 15 aa, Artificial Sequence
  Cyclic GFR-binding peptide
  MOD_RES (14)..(15): Xaa is C or S
YYLISTASLRTPVXX

SEQ ID NO: 8956 - protein, 14 aa, Artificial Sequence
  Cyclic GFR-binding peptide
  MOD_RES (14)..(14): Xaa is C or S
FYLINIPSLDQSVX

SEQ ID NO: 8957 - protein, 17 aa, Artificial Sequence
  Cyclic GFR-binding peptide
  MOD_RES (14)..(15): Xaa is C or S
LYLVSIPELKTPVXXAK

SEQ ID NO: 8958 - protein, 27 aa, Artificial Sequence
  Cyclic GFR-binding peptide
  MOD_RES (21)..(22): Xaa is C or S
VVNKNEDYYLISTASMKEPVXXPEPIG

SEQ ID NO: 8959 - protein, 19 aa, Artificial Sequence
  Cyclic GFR-binding peptide
  MOD_RES (14)..(15): Xaa is C or S
FYLVSIANLKTPVXXAKGV

SEQ ID NO: 8960 - protein, 14 aa, Artificial Sequence
  Cyclic GFR-binding peptide
  MOD_RES (14)..(14): Xaa is C or S
LYLISIPELAQPVX

SEQ ID NO: 8961 - protein, 19 aa, Artificial Sequence
  Cyclic GFR-binding peptide
VVNNASDFYLISIANLRTP

SEQ ID NO: 8962 - protein, 17 aa, Artificial Sequence
  Cyclic GFR-binding peptide
  MOD_RES (14)..(15): Xaa is C or S
FYLISIANMKEPVXXPE

SEQ ID NO: 8963 - protein, 15 aa, Artificial Sequence
  Cyclic GFR-binding peptide
IIQQKDNLYLMSIPE

SEQ ID NO: 8964 - protein, 17 aa, Artificial Sequence
  Cyclic GFR-binding peptide
  MOD_RES (14)..(15): Xaa is C or S
FYLVSIANLKTPAXXPK

SEQ ID NO: 8965 - protein, 14 aa, Artificial Sequence
  Cyclic GFR-binding peptide
  MOD_RES (14)..(14): Xaa is C or S
YYLMSTASTKVPAX

SEQ ID NO: 8966 - protein, 27 aa, Artificial Sequence
  Cyclic GFR-binding peptide
  MOD_RES (21)..(22): Xaa is C or S
VVNNAADKYLISIPSLRAPVXXSAPAA

SEQ ID NO: 8967 - protein, 18 aa, Artificial Sequence
  Cyclic GFR-binding peptide
  MOD_RES (14)..(14): Xaa is C or S
LYLVSIPELKTPAXTPKT

SEQ ID NO: 8968 - protein, 16 aa, Artificial Sequence
  Cyclic GFR-binding peptide
  MOD_RES (14)..(15): Xaa is C or S
LYLMSIPETKVPAXXT

SEQ ID NO: 8969 - protein, 17 aa, Artificial Sequence
  Cyclic GFR-binding peptide
IKPTKGILYLISIPELD

SEQ ID NO: 8970 - protein, 20 aa, Artificial Sequence
  Cyclic GFR-binding peptide
  MOD_RES (14)..(15): Xaa is C or S
FYLISIANLAQPVXXPAASA

SEQ ID NO: 8971 - protein, 27 aa, Artificial Sequence
  Cyclic GFR-binding peptide
  MOD_RES (21)..(22): Xaa is C or S
IVNSSDDFYLVNIPSLKTPAXXPKPVH

SEQ ID NO: 8972 - protein, 17 aa, Artificial Sequence
  Cyclic GFR-binding peptide
VVNKNEDYYLISTASMK

SEQ ID NO: 8973 - protein, 17 aa, Artificial Sequence
  Cyclic GFR-binding peptide
LLVRGNDLYLMSIPETK

SEQ ID NO: 8974 - protein, 15 aa, Artificial Sequence
  Cyclic GFR-binding peptide
  MOD_RES (14)..(15): Xaa is C or S
FYLINIPSLDQPVXX

SEQ ID NO: 8975 - protein, 19 aa, Artificial Sequence
  Cyclic GFR-binding peptide
IVNSSDDLYLVSIPELQTP

SEQ ID NO: 8976 - protein, 16 aa, Artificial Sequence
  Cyclic GFR-binding peptide
VVNKNEDYYLISTASM

SEQ ID NO: 8977 - protein, 19 aa, Artificial Sequence
  Cyclic GFR-binding peptide
  MOD_RES (14)..(15): Xaa is C or S
KYLISIPSMKEPVXXPEPI

SEQ ID NO: 8978 - protein, 17 aa, Artificial Sequence
  Cyclic GFR-binding peptide
  MOD_RES (14)..(15): Xaa is C or S
LYLVSIPELQTPAXXPK

SEQ ID NO: 8979 - protein, 16 aa, Artificial Sequence
  Cyclic GFR-binding peptide
  MOD_RES (14)..(15): Xaa is C or S
FYLMSIANTKVPAXXT

SEQ ID NO: 8980 - protein, 19 aa, Artificial Sequence
  Cyclic GFR-binding peptide
  MOD_RES (14)..(15): Xaa is C or S
YYLISTASLRTPVXXTPPT

SEQ ID NO: 8981 - protein, 20 aa, Artificial Sequence
  Cyclic GFR-binding peptide
  MOD_RES (14)..(15): Xaa is C or S
YYLMSTASTKVPAXXTSPVR

SEQ ID NO: 8982 - protein, 16 aa, Artificial Sequence
  Cyclic GFR-binding peptide
IVNSSDDLYLVSIPEL

SEQ ID NO: 8983 - protein, 16 aa, Artificial Sequence
  Cyclic GFR-binding peptide
LLVRGNDLYLMSIPET

SEQ ID NO: 8984 - protein, 15 aa, Artificial Sequence
  Cyclic GFR-binding peptide
VKPTRGVFYLISIAN

SEQ ID NO: 8985 - protein, 27 aa, Artificial Sequence
  Cyclic GFR-binding peptide
  MOD_RES (21)..(22): Xaa is C or S
VVKDYEDLYLMSIPELETPVXXAKPIS

SEQ ID NO: 8986 - protein, 17 aa, Artificial Sequence
  Cyclic GFR-binding peptide
  MOD_RES (14)..(15): Xaa is C or S
FYLINIPSLKTPVXXAK

SEQ ID NO: 8987 - protein, 17 aa, Artificial Sequence
  Cyclic GFR-binding peptide
  MOD_RES (14)..(15): Xaa is C or S
YYLISTASLRAPVXXSA

SEQ ID NO: 8988 - protein, 19 aa, Artificial Sequence
  Cyclic GFR-binding peptide
IKPTKGIYYLISTASLDQS

SEQ ID NO: 8989 - protein, 18 aa, Artificial Sequence
  Cyclic GFR-binding peptide
  MOD_RES (14)..(15): Xaa is C or S
LYLISIPEMKEPVXXPEP

SEQ ID NO: 8990 - protein, 18 aa, Artificial Sequence
  Cyclic GFR-binding peptide
LLVRGNDKYLMSIPSTKV

SEQ ID NO: 8991 - protein, 27 aa, Artificial Sequence
  Cyclic GFR-binding peptide
  MOD_RES (21)..(22): Xaa is C or S
VKPKRGVFYLISIANLAQPVXXPAASA

SEQ ID NO: 8992 - protein, 15 aa, Artificial Sequence
  Cyclic GFR-binding peptide
  MOD_RES (14)..(15): Xaa is C or S
FYLVSIANLKTPAXX

SEQ ID NO: 8993 - protein, 16 aa, Artificial Sequence
  Cyclic GFR-binding peptide
  MOD_RES (14)..(15): Xaa is C or S
LYLMSIPELETPVXXA

SEQ ID NO: 8994 - protein, 15 aa, Artificial Sequence
  Cyclic GFR-binding peptide
IIQQKDNFYLMSIAN

SEQ ID NO: 8995 - protein, 19 aa, Artificial Sequence
  Cyclic GFR-binding peptide
IVNSSDDFYLVSIANLQTP

SEQ ID NO: 8996 - protein, 13 aa, Artificial Sequence
  Cyclic GFR-binding peptide
LYLVSIPELQTPA

SEQ ID NO: 8997 - protein, 14 aa, Artificial Sequence
  Cyclic GFR-binding peptide
  MOD_RES (14)..(14): Xaa is C or S
LYLISIPELDQPVX

SEQ ID NO: 8998 - protein, 19 aa, Artificial Sequence
  Cyclic GFR-binding peptide
  MOD_RES (14)..(15): Xaa is C or S
LYLVSIPELKTPAXXAKPV

SEQ ID NO: 8999 - protein, 15 aa, Artificial Sequence
  Cyclic GFR-binding peptide
  MOD_RES (14)..(15): Xaa is C or S
LYLVSIPELQTPAXX

SEQ ID NO: 9000 - protein, 18 aa, Artificial Sequence
  Cyclic GFR-binding peptide
VVKDYEDFYLMNIPSLET

SEQ ID NO: 9001 - protein, 16 aa, Artificial Sequence
  Cyclic GFR-binding peptide
  MOD_RES (14)..(15): Xaa is C or S
YYLMSTASMKTPTXXP

SEQ ID NO: 9002 - protein, 16 aa, Artificial Sequence
  Cyclic GFR-binding peptide
  MOD_RES (14)..(15): Xaa is C or S
LYLISIPELRTPVXXT

SEQ ID NO: 9003 - protein, 27 aa, Artificial Sequence
  Cyclic GFR-binding peptide
  MOD_RES (21)..(22): Xaa is C or S
VVNNASDLYLISIPELRTPVXXTPPTS

SEQ ID NO: 9004 - protein, 13 aa, Artificial Sequence
  Cyclic GFR-binding peptide
FYLINIPSLDQPV

SEQ ID NO: 9005 - protein, 17 aa, Artificial Sequence
  Cyclic GFR-binding peptide
  MOD_RES (14)..(15): Xaa is C or S
FYLMSIANTKVPAXXTS

SEQ ID NO: 9006 - protein, 15 aa, Artificial Sequence
  Cyclic GFR-binding peptide
VVNKNEDLYLISIPE

SEQ ID NO: 9007 - protein, 17 aa, Artificial Sequence
  Cyclic GFR-binding peptide
  MOD_RES (14)..(15): Xaa is C or S
YYLVSTASLKTPVXXAK

SEQ ID NO: 9008 - protein, 19 aa, Artificial Sequence
  Cyclic GFR-binding peptide
  MOD_RES (14)..(15): Xaa is C or S
FYLINIPSLDQSVXXPSAS

SEQ ID NO: 9009 - protein, 19 aa, Artificial Sequence
  Cyclic GFR-binding peptide
VVKENEDFYLMSIANLETP

SEQ ID NO: 9010 - protein, 27 aa, Artificial Sequence
  Cyclic GFR-binding peptide
  MOD_RES (21)..(22): Xaa is C or S
VVKENEDFYLMSIANLETPVXXAKPIK

SEQ ID NO: 9011 - protein, 20 aa, Artificial Sequence
  Cyclic GFR-binding peptide
  MOD_RES (14)..(15): Xaa is C or S
KYLISIPSLKTPVXXAKSAK

SEQ ID NO: 9012 - protein, 14 aa, Artificial Sequence
  Cyclic GFR-binding peptide
  MOD_RES (14)..(14): Xaa is C or S
KYLISIPSLRTPVX

SEQ ID NO: 9013 - protein, 15 aa, Artificial Sequence
  Cyclic GFR-binding peptide
  MOD_RES (14)..(15): Xaa is C or S
KYLVSIPSLKTPAXX

SEQ ID NO: 9014 - protein, 13 aa, Artificial Sequence
  Cyclic GFR-binding peptide
LYLISIPELRAPV

SEQ ID NO: 9015 - protein, 18 aa, Artificial Sequence
  Cyclic GFR-binding peptide
VVNKNEDFYLISIANMKE

SEQ ID NO: 9016 - protein, 15 aa, Artificial Sequence
  Cyclic GFR-binding peptide
  MOD_RES (14)..(15): Xaa is C or S
LYLISIPEMKEPVXX

SEQ ID NO: 9017 - protein, 20 aa, Artificial Sequence
  Cyclic GFR-binding peptide
  MOD_RES (14)..(15): Xaa is C or S
FYLISIANMKEPVXXPEPIG

SEQ ID NO: 9018 - protein, 14 aa, Artificial Sequence
  Cyclic GFR-binding peptide
  MOD_RES (14)..(14): Xaa is C or S
FYLVSIANLQTPAX

SEQ ID NO: 9019 - protein, 16 aa, Artificial Sequence
  Cyclic GFR-binding peptide
VVKENEDFYLMNIPSL

SEQ ID NO: 9020 - protein, 19 aa, Artificial Sequence
  Cyclic GFR-binding peptide
  MOD_RES (14)..(15): Xaa is C or S
LYLISIPELRAPVXXSAPA

SEQ ID NO: 9021 - protein, 16 aa, Artificial Sequence
  Cyclic GFR-binding peptide
  MOD_RES (14)..(15): Xaa is C or S
KYLVSIPSLKTPAXXP

SEQ ID NO: 9022 - protein, 17 aa, Artificial Sequence
  Cyclic GFR-binding peptide
  MOD_RES (14)..(15): Xaa is C or S
KYLISIPSMKEPVXXPE

SEQ ID NO: 9023 - protein, 14 aa, Artificial Sequence
  Cyclic GFR-binding peptide
  MOD_RES (14)..(14): Xaa is C or S
YYLVSTASLKTPAX

SEQ ID NO: 9024 - protein, 19 aa, Artificial Sequence
  Cyclic GFR-binding peptide
  MOD_RES (14)..(15): Xaa is C or S
KYLISIPSLAQPVXXPAAS

SEQ ID NO: 9025 - protein, 18 aa, Artificial Sequence
  Cyclic GFR-binding peptide
  MOD_RES (14)..(15): Xaa is C or S
LYLMSIPELETPVXXAKP

SEQ ID NO: 9026 - protein, 19 aa, Artificial Sequence
  Cyclic GFR-binding peptide
VVNKNEDYYLISTASMKEP

SEQ ID NO: 9027 - protein, 16 aa, Artificial Sequence
  Cyclic GFR-binding peptide
  MOD_RES (14)..(15): Xaa is C or S
YYLISTASLRTPVXXT

SEQ ID NO: 9028 - protein, 19 aa, Artificial Sequence
  Cyclic GFR-binding peptide
  MOD_RES (14)..(15): Xaa is C or S
FYLISIANLAQPVXXPAAS

SEQ ID NO: 9029 - protein, 13 aa, Artificial Sequence
  Cyclic GFR-binding peptide
KYLISIPSLDQPV

SEQ ID NO: 9030 - protein, 14 aa, Artificial Sequence
  Cyclic GFR-binding peptide
  MOD_RES (14)..(14): Xaa is C or S
KYLVSIPSLQTPAX

SEQ ID NO: 9031 - protein, 15 aa, Artificial Sequence
  Cyclic GFR-binding peptide
VKPTRGVKYLISIPS

SEQ ID NO: 9032 - protein, 15 aa, Artificial Sequence
  Cyclic GFR-binding peptide
  MOD_RES (14)..(14): Xaa is C or S
FYLVSIANLKTPAXT

SEQ ID NO: 9033 - protein, 13 aa, Artificial Sequence
  Cyclic GFR-binding peptide
FYLINIPSLAQPV

SEQ ID NO: 9034 - protein, 16 aa, Artificial Sequence
  Cyclic GFR-binding peptide
VVNNASDLYLISIPEL

SEQ ID NO: 9035 - protein, 13 aa, Artificial Sequence
  Cyclic GFR-binding peptide
FYLVNIPSLQTPA

SEQ ID NO: 9036 - protein, 15 aa, Artificial Sequence
  Cyclic GFR-binding peptide
IKPTKGIFYLINIPS

SEQ ID NO: 9037 - protein, 16 aa, Artificial Sequence
  Cyclic GFR-binding peptide
VVKDYEDFYLMSIANL

SEQ ID NO: 9038 - protein, 16 aa, Artificial Sequence
  Cyclic GFR-binding peptide
VVNKNEDKYLISIPSM

SEQ ID NO: 9039 - protein, 18 aa, Artificial Sequence
  Cyclic GFR-binding peptide
VVKENEDKYLMSIPSLET

SEQ ID NO: 9040 - protein, 17 aa, Artificial Sequence
  Cyclic GFR-binding peptide
TPVGMDDFYLVNIPSLK

SEQ ID NO: 9041 - protein, 19 aa, Artificial Sequence
  Cyclic GFR-binding peptide
VKPTRGVYYLISTASLDQP

SEQ ID NO: 9042 - protein, 17 aa, Artificial Sequence
  Cyclic GFR-binding peptide
  MOD_RES (14)..(15): Xaa is C or S
YYLMSTASLETPVXXAK

SEQ ID NO: 9043 - protein, 15 aa, Artificial Sequence
  Cyclic GFR-binding peptide
  MOD_RES (14)..(15): Xaa is C or S
FYLINIPSLRAPVXX

SEQ ID NO: 9044 - protein, 27 aa, Artificial Sequence
  Cyclic GFR-binding peptide
  MOD_RES (21)..(21): Xaa is C or S
IVNSSDDKYLVSIPSLKTPAXTPKTVH

SEQ ID NO: 9045 - protein, 18 aa, Artificial Sequence
  Cyclic GFR-binding peptide
VKPTRGVKYLISIPSLDQ

SEQ ID NO: 9046 - protein, 18 aa, Artificial Sequence
  Cyclic GFR-binding peptide
IIQQKDNKYLMSIPSMKT

SEQ ID NO: 9047 - protein, 27 aa, Artificial Sequence
  Cyclic GFR-binding peptide
  MOD_RES (21)..(22): Xaa is C or S
LLVRGNDFYLMSIANTKVPAXXTSPVR

SEQ ID NO: 9048 - protein, 18 aa, Artificial Sequence
  Cyclic GFR-binding peptide
IKPTKGIFYLINIPSLDQ

SEQ ID NO: 9049 - protein, 27 aa, Artificial Sequence
  Cyclic GFR-binding peptide
  MOD_RES (21)..(22): Xaa is C or S
YTVVGKDYYLISTASLKTPVXXAKSAK

SEQ ID NO: 9050 - protein, 18 aa, Artificial Sequence
  Cyclic GFR-binding peptide
VKPKRGVLYLISIPELAQ

SEQ ID NO: 9051 - protein, 16 aa, Artificial Sequence
  Cyclic GFR-binding peptide
IKPTKGILYLISIPEL

SEQ ID NO: 9052 - protein, 19 aa, Artificial Sequence
  Cyclic GFR-binding peptide
  MOD_RES (14)..(15): Xaa is C or S
FYLMSIANLETPVXXAKPI

SEQ ID NO: 9053 - protein, 18 aa, Artificial Sequence
  Cyclic GFR-binding peptide
  MOD_RES (14)..(15): Xaa is C or S
LYLVSIPELKTPAXXPKP

SEQ ID NO: 9054 - protein, 27 aa, Artificial Sequence
  Cyclic GFR-binding peptide
  MOD_RES (21)..(22): Xaa is C or S
IVNSSDDFYLVSIANLKTPAXXPKPVY

SEQ ID NO: 9055 - protein, 14 aa, Artificial Sequence
  Cyclic GFR-binding peptide
  MOD_RES (14)..(14): Xaa is C or S
YYLVSTASLKTPVX

SEQ ID NO: 9056 - protein, 20 aa, Artificial Sequence
  Cyclic GFR-binding peptide
  MOD_RES (14)..(15): Xaa is C or S
KYLMSIPSLETPVXXAKPIS

SEQ ID NO: 9057 - protein, 20 aa, Artificial Sequence
  Cyclic GFR-binding peptide
  MOD_RES (14)..(15): Xaa is C or S
FYLMSIANLETPVXXAKPIS

SEQ ID NO: 9058 - protein, 18 aa, Artificial Sequence
  Cyclic GFR-binding peptide
  MOD_RES (14)..(15): Xaa is C or S
LYLVSIPELKTPVXXAKG

SEQ ID NO: 9059 - protein, 17 aa, Artificial Sequence
  Cyclic GFR-binding peptide
  MOD_RES (14)..(15): Xaa is C or S
LYLISIPELRTPVXXTP

SEQ ID NO: 9060 - protein, 19 aa, Artificial Sequence
  Cyclic GFR-binding peptide
  MOD_RES (14)..(15): Xaa is C or S
KYLISIPSLDQPVXXPSAS

SEQ ID NO: 9061 - protein, 20 aa, Artificial Sequence
  Cyclic GFR-binding peptide
  MOD_RES (14)..(15): Xaa is C or S
FYLISIANLKTPVXXAKSAK

SEQ ID NO: 9062 - protein, 19 aa, Artificial Sequence
  Cyclic GFR-binding peptide
IKPTKGIKYLISIPSLDQS

SEQ ID NO: 9063 - protein, 18 aa, Artificial Sequence
  Cyclic GFR-binding peptide
VKPTRGVFYLISIANLDQ

SEQ ID NO: 9064 - protein, 20 aa, Artificial Sequence
  Cyclic GFR-binding peptide
  MOD_RES (14)..(15): Xaa is C or S
KYLVSIPSLKTPAXXPKPVY

SEQ ID NO: 9065 - protein, 16 aa, Artificial Sequence
  Cyclic GFR-binding peptide
IVNNSSDFYLVSIANL

SEQ ID NO: 9066 - protein, 16 aa, Artificial Sequence
  Cyclic GFR-binding peptide
  MOD_RES (14)..(15): Xaa is C or S
FYLVSIANLKTPAXXA

SEQ ID NO: 9067 - protein, 16 aa, Artificial Sequence
  Cyclic GFR-binding peptide
  MOD_RES (14)..(15): Xaa is C or S
FYLISIANLKTPVXXA

SEQ ID NO: 9068 - protein, 16 aa, Artificial Sequence
  Cyclic GFR-binding peptide
  MOD_RES (14)..(14): Xaa is C or S
YYLVSTASLKTPAXTP

SEQ ID NO: 9069 - protein, 19 aa, Artificial Sequence
  Cyclic GFR-binding peptide
VKPTRGVFYLISIANLDQP

SEQ ID NO: 9070 - protein, 13 aa, Artificial Sequence
  Cyclic GFR-binding peptide
KYLMSIPSMKTPT

SEQ ID NO: 9071 - protein, 15 aa, Artificial Sequence
  Cyclic GFR-binding peptide
VVKDYEDLYLMSIPE

SEQ ID NO: 9072 - protein, 15 aa, Artificial Sequence
  Cyclic GFR-binding peptide
  MOD_RES (14)..(15): Xaa is C or S
FYLINIPSLRTPVXX

SEQ ID NO: 9073 - protein, 15 aa, Artificial Sequence
  Cyclic GFR-binding peptide
  MOD_RES (14)..(15): Xaa is C or S
FYLVSIANLKTPVXX

SEQ ID NO: 9074 - protein, 19 aa, Artificial Sequence
  Cyclic GFR-binding peptide
  MOD_RES (14)..(15): Xaa is C or S
YYLVSTASLKTPVXXAKGV

SEQ ID NO: 9075 - protein, 19 aa, Artificial Sequence
  Cyclic GFR-binding peptide
VVNNAADYYLISTASLRAP

SEQ ID NO: 9076 - protein, 19 aa, Artificial Sequence
  Cyclic GFR-binding peptide
  MOD_RES (14)..(15): Xaa is C or S
FYLVSIANLQTPAXXPKPV

SEQ ID NO: 9077 - protein, 13 aa, Artificial Sequence
  Cyclic GFR-binding peptide
YYLMSTASMKTPT

SEQ ID NO: 9078 - protein, 17 aa, Artificial Sequence
  Cyclic GFR-binding peptide
  MOD_RES (14)..(15): Xaa is C or S
FYLISIANLRAPVXXSA

SEQ ID NO: 9079 - protein, 20 aa, Artificial Sequence
  Cyclic GFR-binding peptide
  MOD_RES (14)..(15): Xaa is C or S
YYLISTASLDQPVXXPSASA

SEQ ID NO: 9080 - protein, 15 aa, Artificial Sequence
  Cyclic GFR-binding peptide
  MOD_RES (14)..(15): Xaa is C or S
YYLVSTASLKTPVXX

SEQ ID NO: 9081 - protein, 19 aa, Artificial Sequence
  Cyclic GFR-binding peptide
  MOD_RES (14)..(15): Xaa is C or S
KYLVSIPSLQTPAXXPKPV

SEQ ID NO: 9082 - protein, 19 aa, Artificial Sequence
  Cyclic GFR-binding peptide
VVNNAADFYLINIPSLRAP

SEQ ID NO: 9083 - protein, 19 aa, Artificial Sequence
  Cyclic GFR-binding peptide
  MOD_RES (14)..(15): Xaa is C or S
FYLVSIANLKTPAXXPKPV

SEQ ID NO: 9084 - protein, 20 aa, Artificial Sequence
  Cyclic GFR-binding peptide
  MOD_RES (14)..(15): Xaa is C or S
FYLVSIANLQTPAXXPKPVT

SEQ ID NO: 9085 - protein, 19 aa, Artificial Sequence
  Cyclic GFR-binding peptide
  MOD_RES (14)..(15): Xaa is C or S
FYLISIANLKTPVXXAKSA

SEQ ID NO: 9086 - protein, 18 aa, Artificial Sequence
  Cyclic GFR-binding peptide
  MOD_RES (14)..(15): Xaa is C or S
FYLISIANLAQPVXXPAA

SEQ ID NO: 9087 - protein, 16 aa, Artificial Sequence
  Cyclic GFR-binding peptide
  MOD_RES (14)..(14): Xaa is C or S
KYLVSIPSLKTPAXTP

SEQ ID NO: 9088 - protein, 18 aa, Artificial Sequence
  Cyclic GFR-binding peptide
IVNSSDDKYLVSIPSLQT

SEQ ID NO: 9089 - protein, 20 aa, Artificial Sequence
  Cyclic GFR-binding peptide
  MOD_RES (14)..(15): Xaa is C or S
LYLISIPELRTPVXXTPPTS

SEQ ID NO: 9090 - protein, 20 aa, Artificial Sequence
  Cyclic GFR-binding peptide
  MOD_RES (14)..(15): Xaa is C or S
FYLVNIPSLKTPAXXPKPVY

SEQ ID NO: 9091 - protein, 15 aa, Artificial Sequence
  Cyclic GFR-binding peptide
  MOD_RES (14)..(15): Xaa is C or S
FYLISIANLDQSVXX

SEQ ID NO: 9092 - protein, 27 aa, Artificial Sequence
  Cyclic GFR-binding peptide
  MOD_RES (21)..(22): Xaa is C or S
VVKENEDYYLMSTASLETPVXXAKPIK

SEQ ID NO: 9093 - protein, 19 aa, Artificial Sequence
  Cyclic GFR-binding peptide
VVKENEDYYLMSTASLETP

SEQ ID NO: 9094 - protein, 19 aa, Artificial Sequence
  Cyclic GFR-binding peptide
  MOD_RES (14)..(15): Xaa is C or S
KYLVSIPSLKTPAXXPKPV

SEQ ID NO: 9095 - protein, 27 aa, Artificial Sequence
  Cyclic GFR-binding peptide
  MOD_RES (21)..(22): Xaa is C or S
TPVGMDDLYLVSIPELKTPVXXAKGVK

SEQ ID NO: 9096 - protein, 13 aa, Artificial Sequence
  Cyclic GFR-binding peptide
FYLINIPSLDQSV

SEQ ID NO: 9097 - protein, 27 aa, Artificial Sequence
  Cyclic GFR-binding peptide
  MOD_RES (21)..(22): Xaa is C or S
VVNNAADFYLISIANLRAPVXXSAPAA

SEQ ID NO: 9098 - protein, 13 aa, Artificial Sequence
  Cyclic GFR-binding peptide
YYLISTASLDQPV

SEQ ID NO: 9099 - protein, 17 aa, Artificial Sequence
  Cyclic GFR-binding peptide
  MOD_RES (14)..(15): Xaa is C or S
LYLMSIPEMKTPTXXPG

SEQ ID NO: 9100 - protein, 19 aa, Artificial Sequence
  Cyclic GFR-binding peptide
LLVRGNDLYLMSIPETKVP

SEQ ID NO: 9101 - protein, 20 aa, Artificial Sequence
  Cyclic GFR-binding peptide
  MOD_RES (14)..(15): Xaa is C or S
FYLISIANLDQSVXXPSASA

SEQ ID NO: 9102 - protein, 19 aa, Artificial Sequence
  Cyclic GFR-binding peptide
  MOD_RES (14)..(15): Xaa is C or S
FYLMSIANTKVPAXXTSPV

SEQ ID NO: 9103 - protein, 18 aa, Artificial Sequence
  Cyclic GFR-binding peptide
  MOD_RES (14)..(15): Xaa is C or S
YYLMSTASMKTPTXXPGA

SEQ ID NO: 9104 - protein, 18 aa, Artificial Sequence
  Cyclic GFR-binding peptide
LLVRGNDFYLMNIPSTKV

SEQ ID NO: 9105 - protein, 17 aa, Artificial Sequence
  Cyclic GFR-binding peptide
VKPTRGVYYLISTASLD

SEQ ID NO: 9106 - protein, 19 aa, Artificial Sequence
  Cyclic GFR-binding peptide
  MOD_RES (14)..(15): Xaa is C or S
KYLMSIPSTKVPAXXTSPV

SEQ ID NO: 9107 - protein, 15 aa, Artificial Sequence
  Cyclic GFR-binding peptide
  MOD_RES (14)..(15): Xaa is C or S
LYLISIPELAQPVXX

SEQ ID NO: 9108 - protein, 18 aa, Artificial Sequence
  Cyclic GFR-binding peptide
  MOD_RES (14)..(15): Xaa is C or S
FYLISIANLDQPVXXPSA

SEQ ID NO: 9109 - protein, 20 aa, Artificial Sequence
  Cyclic GFR-binding peptide
  MOD_RES (14)..(15): Xaa is C or S
KYLISIPSLDQSVXXPSASA

SEQ ID NO: 9110 - protein, 15 aa, Artificial Sequence
  Cyclic GFR-binding peptide
  MOD_RES (14)..(15): Xaa is C or S
YYLMSTASLETPVXX

SEQ ID NO: 9111 - protein, 18 aa, Artificial Sequence
  Cyclic GFR-binding peptide
IIQQKDNFYLMSIANMKT

SEQ ID NO: 9112 - protein, 18 aa, Artificial Sequence
  Cyclic GFR-binding peptide
IVNSSDDKYLVSIPSLKT

SEQ ID NO: 9113 - protein, 20 aa, Artificial Sequence
  Cyclic GFR-binding peptide
  MOD_RES (14)..(15): Xaa is C or S
FYLMNIPSTKVPAXXTSPVR

SEQ ID NO: 9114 - protein, 13 aa, Artificial Sequence
  Cyclic GFR-binding peptide
KYLISIPSLDQSV

SEQ ID NO: 9115 - protein, 16 aa, Artificial Sequence
  Cyclic GFR-binding peptide
  MOD_RES (14)..(15): Xaa is C or S
FYLISIANLDQPVXXP

SEQ ID NO: 9116 - protein, 27 aa, Artificial Sequence
  Cyclic GFR-binding peptide
  MOD_RES (21)..(22): Xaa is C or S
LLVRGNDKYLMSIPSTKVPAXXTSPVR

SEQ ID NO: 9117 - protein, 14 aa, Artificial Sequence
  Cyclic GFR-binding peptide
  MOD_RES (14)..(14): Xaa is C or S
YYLVSTASLQTPAX

SEQ ID NO: 9118 - protein, 16 aa, Artificial Sequence
  Cyclic GFR-binding peptide
  MOD_RES (14)..(15): Xaa is C or S
YYLISTASLRAPVXXS

SEQ ID NO: 9119 - protein, 18 aa, Artificial Sequence
  Cyclic GFR-binding peptide
  MOD_RES (14)..(15): Xaa is C or S
FYLISIANLRTPVXXTPP

SEQ ID NO: 9120 - protein, 16 aa, Artificial Sequence
  Cyclic GFR-binding peptide
  MOD_RES (14)..(15): Xaa is C or S
FYLMSIANMKTPTXXP

SEQ ID NO: 9121 - protein, 16 aa, Artificial Sequence
  Cyclic GFR-binding peptide
VVKDYEDKYLMSIPSL

SEQ ID NO: 9122 - protein, 19 aa, Artificial Sequence
  Cyclic GFR-binding peptide
  MOD_RES (14)..(15): Xaa is C or S
FYLISIANMKEPVXXPEPI

SEQ ID NO: 9123 - protein, 18 aa, Artificial Sequence
  Cyclic GFR-binding peptide
IKPTKGIKYLISIPSLDQ

SEQ ID NO: 9124 - protein, 16 aa, Artificial Sequence
  Cyclic GFR-binding peptide
  MOD_RES (14)..(15): Xaa is C or S
KYLVSIPSLQTPAXXP

SEQ ID NO: 9125 - protein, 18 aa, Artificial Sequence
  Cyclic GFR-binding peptide
  MOD_RES (14)..(15): Xaa is C or S
LYLISIPELAQPVXXPAA

SEQ ID NO: 9126 - protein, 15 aa, Artificial Sequence
  Cyclic GFR-binding peptide
TPVGMDDFYLVSIAN

SEQ ID NO: 9127 - protein, 27 aa, Artificial Sequence
  Cyclic GFR-binding peptide
  MOD_RES (21)..(22): Xaa is C or S
IVNNSSDFYLVNIPSLKTPAXXAKPVA

SEQ ID NO: 9128 - protein, 20 aa, Artificial Sequence
  Cyclic GFR-binding peptide
  MOD_RES (14)..(15): Xaa is C or S
LYLVSIPELKTPAXXPKPVH

SEQ ID NO: 9129 - protein, 27 aa, Artificial Sequence
  Cyclic GFR-binding peptide
  MOD_RES (21)..(22): Xaa is C or S
VVNKNEDFYLISIANMKEPVXXPEPIG

SEQ ID NO: 9130 - protein, 15 aa, Artificial Sequence
  Cyclic GFR-binding peptide
  MOD_RES (14)..(15): Xaa is C or S
KYLISIPSLKTPVXX

SEQ ID NO: 9131 - protein, 19 aa, Artificial Sequence
  Cyclic GFR-binding peptide
IKPTKGIFYLINIPSLDQS

SEQ ID NO: 9132 - protein, 18 aa, Artificial Sequence
  Cyclic GFR-binding peptide
VVKENEDFYLMSIANLET

SEQ ID NO: 9133 - protein, 18 aa, Artificial Sequence
  Cyclic GFR-binding peptide
  MOD_RES (14)..(15): Xaa is C or S
KYLISIPSMKEPVXXPEP

SEQ ID NO: 9134 - protein, 14 aa, Artificial Sequence
  Cyclic GFR-binding peptide
  MOD_RES (14)..(14): Xaa is C or S
YYLISTASLKTPVX

SEQ ID NO: 9135 - protein, 17 aa, Artificial Sequence
  Cyclic GFR-binding peptide
TPVGMDDYYLVSTASLK

SEQ ID NO: 9136 - protein, 27 aa, Artificial Sequence
  Cyclic GFR-binding peptide
  MOD_RES (21)..(22): Xaa is C or S
VVNNAADYYLISTASLRAPVXXSAPAA

SEQ ID NO: 9137 - protein, 17 aa, Artificial Sequence
  Cyclic GFR-binding peptide
  MOD_RES (14)..(15): Xaa is C or S
LYLISIPELDQPVXXPS

SEQ ID NO: 9138 - protein, 20 aa, Artificial Sequence
  Cyclic GFR-binding peptide
  MOD_RES (14)..(15): Xaa is C or S
FYLINIPSLRAPVXXSAPAA

SEQ ID NO: 9139 - protein, 19 aa, Artificial Sequence
  Cyclic GFR-binding peptide
IKPTKGIFYLISIANLDQS

SEQ ID NO: 9140 - protein, 16 aa, Artificial Sequence
  Cyclic GFR-binding peptide
VKPKRGVLYLISIPEL

SEQ ID NO: 9141 - protein, 13 aa, Artificial Sequence
  Cyclic GFR-binding peptide
FYLVNIPSLKTPV

SEQ ID NO: 9142 - protein, 18 aa, Artificial Sequence
  Cyclic GFR-binding peptide
VVKENEDFYLMNIPSLET

SEQ ID NO: 9143 - protein, 15 aa, Artificial Sequence
  Cyclic GFR-binding peptide
TPVGMDDFYLVNIPS

SEQ ID NO: 9144 - protein, 13 aa, Artificial Sequence
  Cyclic GFR-binding peptide
FYLINIPSMKEPV

SEQ ID NO: 9145 - protein, 27 aa, Artificial Sequence
  Cyclic GFR-binding peptide
  MOD_RES (21)..(22): Xaa is C or S
IVNSSDDKYLVSIPSLKTPAXXPKPVH

SEQ ID NO: 9146 - protein, 20 aa, Artificial Sequence
  Cyclic GFR-binding peptide
  MOD_RES (14)..(14): Xaa is C or S
YYLVSTASLKTPAXTPKTVH

SEQ ID NO: 9147 - protein, 15 aa, Artificial Sequence
  Cyclic GFR-binding peptide
LLVRGNDLYLMSIPE

SEQ ID NO: 9148 - protein, 27 aa, Artificial Sequence
  Cyclic GFR-binding peptide
  MOD_RES (21)..(22): Xaa is C or S
IVNSSDDLYLVSIPELQTPAXXPKPVT

SEQ ID NO: 9149 - protein, 14 aa, Artificial Sequence
  Cyclic GFR-binding peptide
  MOD_RES (14)..(14): Xaa is C or S
LYLISIPEMKEPVX

SEQ ID NO: 9150 - protein, 17 aa, Artificial Sequence
  Cyclic GFR-binding peptide
  MOD_RES (14)..(14): Xaa is C or S
FYLVNIPSLKTPAXTPK

SEQ ID NO: 9151 - protein, 14 aa, Artificial Sequence
  Cyclic GFR-binding peptide
  MOD_RES (14)..(14): Xaa is C or S
LYLMSIPELETPVX

SEQ ID NO: 9152 - protein, 16 aa, Artificial Sequence
  Cyclic GFR-binding peptide
  MOD_RES (14)..(15): Xaa is C or S
FYLISIANLAQPVXXP

SEQ ID NO: 9153 - protein, 18 aa, Artificial Sequence
  Cyclic GFR-binding peptide
VVNNAADKYLISIPSLRA

SEQ ID NO: 9154 - protein, 17 aa, Artificial Sequence
  Cyclic GFR-binding peptide
VVKDYEDLYLMSIPELE

SEQ ID NO: 9155 - protein, 16 aa, Artificial Sequence
  Cyclic GFR-binding peptide
  MOD_RES (14)..(15): Xaa is C or S
LYLISIPELDQSVXXP

SEQ ID NO: 9156 - protein, 17 aa, Artificial Sequence
  Cyclic GFR-binding peptide
  MOD_RES (14)..(15): Xaa is C or S
YYLISTASMKEPVXXPE

SEQ ID NO: 9157 - protein, 14 aa, Artificial Sequence
  Cyclic GFR-binding peptide
  MOD_RES (14)..(14): Xaa is C or S
KYLVSIPSLKTPAX

SEQ ID NO: 9158 - protein, 14 aa, Artificial Sequence
  Cyclic GFR-binding peptide
  MOD_RES (14)..(14): Xaa is C or S
FYLISIANMKEPVX

SEQ ID NO: 9159 - protein, 19 aa, Artificial Sequence
  Cyclic GFR-binding peptide
  MOD_RES (14)..(15): Xaa is C or S
FYLISIANLRTPVXXTPPT

SEQ ID NO: 9160 - protein, 16 aa, Artificial Sequence
  Cyclic GFR-binding peptide
  MOD_RES (14)..(15): Xaa is C or S
LYLISIPELAQPVXXP

SEQ ID NO: 9161 - protein, 27 aa, Artificial Sequence
  Cyclic GFR-binding peptide
  MOD_RES (21)..(22): Xaa is C or S
VKPTRGVYYLISTASLDQPVXXPSASA

SEQ ID NO: 9162 - protein, 27 aa, Artificial Sequence
  Cyclic GFR-binding peptide
  MOD_RES (21)..(22): Xaa is C or S
IIQQKDNFYLMNIPSMKTPTXXPGASG

SEQ ID NO: 9163 - protein, 15 aa, Artificial Sequence
  Cyclic GFR-binding peptide
VKPKRGVKYLISIPS

SEQ ID NO: 9164 - protein, 20 aa, Artificial Sequence
  Cyclic GFR-binding peptide
  MOD_RES (14)..(15): Xaa is C or S
LYLISIPELDQPVXXPSASA

SEQ ID NO: 9165 - protein, 17 aa, Artificial Sequence
  Cyclic GFR-binding peptide
VKPTRGVFYLINIPSLD

SEQ ID NO: 9166 - protein, 15 aa, Artificial Sequence
  Cyclic GFR-binding peptide
  MOD_RES (14)..(15): Xaa is C or S
YYLVSTASLKTPAXX

SEQ ID NO: 9167 - protein, 19 aa, Artificial Sequence
  Cyclic GFR-binding peptide
IIQQKDNYYLMSTASMKTP

SEQ ID NO: 9168 - protein, 17 aa, Artificial Sequence
  Cyclic GFR-binding peptide
  MOD_RES (14)..(15): Xaa is C or S
FYLMSIANMKTPTXXPG

SEQ ID NO: 9169 - protein, 17 aa, Artificial Sequence
  Cyclic GFR-binding peptide
  MOD_RES (14)..(15): Xaa is C or S
YYLISTASLKTPVXXAK

SEQ ID NO: 9170 - protein, 13 aa, Artificial Sequence
  Cyclic GFR-binding peptide
FYLMNIPSTKVPA

SEQ ID NO: 9171 - protein, 18 aa, Artificial Sequence
  Cyclic GFR-binding peptide
  MOD_RES (14)..(15): Xaa is C or S
YYLISTASLDQSVXXPSA

SEQ ID NO: 9172 - protein, 18 aa, Artificial Sequence
  Cyclic GFR-binding peptide
VVNKNEDYYLISTASMKE

SEQ ID NO: 9173 - protein, 14 aa, Artificial Sequence
  Cyclic GFR-binding peptide
  MOD_RES (14)..(14): Xaa is C or S
LYLVSIPELKTPVX

SEQ ID NO: 9174 - protein, 20 aa, Artificial Sequence
  Cyclic GFR-binding peptide
  MOD_RES (14)..(15): Xaa is C or S
FYLISIANLRTPVXXTPPTS

SEQ ID NO: 9175 - protein, 19 aa, Artificial Sequence
  Cyclic GFR-binding peptide
IVNNSSDKYLVSIPSLKTP

SEQ ID NO: 9176 - protein, 19 aa, Artificial Sequence
  Cyclic GFR-binding peptide
VVKDYEDKYLMSIPSLETP

SEQ ID NO: 9177 - protein, 27 aa, Artificial Sequence
  Cyclic GFR-binding peptide
  MOD_RES (21)..(22): Xaa is C or S
VVNKNEDFYLINIPSMKEPVXXPEPIG

SEQ ID NO: 9178 - protein, 18 aa, Artificial Sequence
  Cyclic GFR-binding peptide
  MOD_RES (14)..(15): Xaa is C or S
YYLMSTASLETPVXXAKP

SEQ ID NO: 9179 - protein, 16 aa, Artificial Sequence
  Cyclic GFR-binding peptide
  MOD_RES (14)..(15): Xaa is C or S
LYLVSIPELKTPAXXA

SEQ ID NO: 9180 - protein, 13 aa, Artificial Sequence
  Cyclic GFR-binding peptide
FYLISIANLRTPV

SEQ ID NO: 9181 - protein, 17 aa, Artificial Sequence
  Cyclic GFR-binding peptide
  MOD_RES (14)..(15): Xaa is C or S
KYLVSIPSLKTPAXXAK

SEQ ID NO: 9182 - protein, 13 aa, Artificial Sequence
  Cyclic GFR-binding peptide
YYLISTASLRAPV

SEQ ID NO: 9183 - protein, 19 aa, Artificial Sequence
  Cyclic GFR-binding peptide
  MOD_RES (14)..(15): Xaa is C or S
LYLISIPEMKEPVXXPEPI

SEQ ID NO: 9184 - protein, 13 aa, Artificial Sequence
  Cyclic GFR-binding peptide
KYLISIPSLAQPV

SEQ ID NO: 9185 - protein, 15 aa, Artificial Sequence
  Cyclic GFR-binding peptide
  MOD_RES (14)..(15): Xaa is C or S
KYLVSIPSLQTPAXX

SEQ ID NO: 9186 - protein, 18 aa, Artificial Sequence
  Cyclic GFR-binding peptide
IIQQKDNFYLMNIPSMKT

SEQ ID NO: 9187 - protein, 17 aa, Artificial Sequence
  Cyclic GFR-binding peptide
VVNNAADLYLISIPELR

SEQ ID NO: 9188 - protein, 15 aa, Artificial Sequence
  Cyclic GFR-binding peptide
  MOD_RES (14)..(15): Xaa is C or S
FYLMSIANLETPVXX

SEQ ID NO: 9189 - protein, 16 aa, Artificial Sequence
  Cyclic GFR-binding peptide
YTVVGKDFYLISIANL

SEQ ID NO: 9190 - protein, 16 aa, Artificial Sequence
  Cyclic GFR-binding peptide
VVKENEDYYLMSTASL

SEQ ID NO: 9191 - protein, 27 aa, Artificial Sequence
  Cyclic GFR-binding peptide
  MOD_RES (21)..(22): Xaa is C or S
IVNSSDDYYLVSTASLKTPAXXPKPVY

SEQ ID NO: 9192 - protein, 15 aa, Artificial Sequence
  Cyclic GFR-binding peptide
  MOD_RES (14)..(15): Xaa is C or S
LYLISIPELDQSVXX

SEQ ID NO: 9193 - protein, 18 aa, Artificial Sequence
  Cyclic GFR-binding peptide
  MOD_RES (14)..(15): Xaa is C or S
LYLISIPELRAPVXXSAP

SEQ ID NO: 9194 - protein, 19 aa, Artificial Sequence
  Cyclic GFR-binding peptide
  MOD_RES (14)..(14): Xaa is C or S
KYLVSIPSLKTPAXTPKTV

SEQ ID NO: 9195 - protein, 16 aa, Artificial Sequence
  Cyclic GFR-binding peptide
  MOD_RES (14)..(15): Xaa is C or S
KYLISIPSLRTPVXXT

SEQ ID NO: 9196 - protein, 15 aa, Artificial Sequence
  Cyclic GFR-binding peptide
  MOD_RES (14)..(15): Xaa is C or S
YYLISTASMKEPVXX

SEQ ID NO: 9197 - protein, 18 aa, Artificial Sequence
  Cyclic GFR-binding peptide
IVNSSDDFYLVSIANLQT

SEQ ID NO: 9198 - protein, 18 aa, Artificial Sequence
  Cyclic GFR-binding peptide
  MOD_RES (14)..(15): Xaa is C or S
KYLVSIPSLKTPAXXAKP

SEQ ID NO: 9199 - protein, 19 aa, Artificial Sequence
  Cyclic GFR-binding peptide
VKPTRGVFYLINIPSLDQP

SEQ ID NO: 9200 - protein, 16 aa, Artificial Sequence
  Cyclic GFR-binding peptide
VVNKNEDFYLISIANM

SEQ ID NO: 9201 - protein, 19 aa, Artificial Sequence
  Cyclic GFR-binding peptide
VVKDYEDFYLMNIPSLETP

SEQ ID NO: 9202 - protein, 13 aa, Artificial Sequence
  Cyclic GFR-binding peptide
FYLMNIPSLETPV

SEQ ID NO: 9203 - protein, 19 aa, Artificial Sequence
  Cyclic GFR-binding peptide
  MOD_RES (14)..(15): Xaa is C or S
YYLVSTASLKTPAXXPKPV

SEQ ID NO: 9204 - protein, 19 aa, Artificial Sequence
  Cyclic GFR-binding peptide
  MOD_RES (14)..(15): Xaa is C or S
LYLISIPELRTPVXXTPPT

SEQ ID NO: 9205 - protein, 20 aa, Artificial Sequence
  Cyclic GFR-binding peptide
  MOD_RES (14)..(15): Xaa is C or S
KYLMSIPSLETPVXXAKPIK

SEQ ID NO: 9206 - protein, 18 aa, Artificial Sequence
  Cyclic GFR-binding peptide
VVNNAADFYLISIANLRA

SEQ ID NO: 9207 - protein, 18 aa, Artificial Sequence
  Cyclic GFR-binding peptide
IVNSSDDFYLVSIANLKT

SEQ ID NO: 9208 - protein, 18 aa, Artificial Sequence
  Cyclic GFR-binding peptide
  MOD_RES (14)..(15): Xaa is C or S
FYLISIANLKTPVXXAKS

SEQ ID NO: 9209 - protein, 18 aa, Artificial Sequence
  Cyclic GFR-binding peptide
  MOD_RES (14)..(15): Xaa is C or S
KYLMSIPSMKTPTXXPGA

SEQ ID NO: 9210 - protein, 20 aa, Artificial Sequence
  Cyclic GFR-binding peptide
  MOD_RES (14)..(15): Xaa is C or S
YYLISTASLDQSVXXPSASA

SEQ ID NO: 9211 - protein, 14 aa, Artificial Sequence
  Cyclic GFR-binding peptide
  MOD_RES (14)..(14): Xaa is C or S
LYLMSIPETKVPAX

SEQ ID NO: 9212 - protein, 18 aa, Artificial Sequence
  Cyclic GFR-binding peptide
TPVGMDDLYLVSIPELKT

SEQ ID NO: 9213 - protein, 15 aa, Artificial Sequence
  Cyclic GFR-binding peptide
VVNNAADLYLISIPE

SEQ ID NO: 9214 - protein, 16 aa, Artificial Sequence
  Cyclic GFR-binding peptide
IVNSSDDYYLVSTASL

SEQ ID NO: 9215 - protein, 20 aa, Artificial Sequence
  Cyclic GFR-binding peptide
  MOD_RES (14)..(15): Xaa is C or S
YYLMSTASLETPVXXAKPIK

SEQ ID NO: 9216 - protein, 18 aa, Artificial Sequence
  Cyclic GFR-binding peptide
  MOD_RES (14)..(15): Xaa is C or S
LYLISIPELRTPVXXTPP

SEQ ID NO: 9217 - protein, 15 aa, Artificial Sequence
  Cyclic GFR-binding peptide
IVNNSSDYYLVSTAS

SEQ ID NO: 9218 - protein, 16 aa, Artificial Sequence
  Cyclic GFR-binding peptide
  MOD_RES (14)..(15): Xaa is C or S
FYLISIANLDQSVXXP

SEQ ID NO: 9219 - protein, 15 aa, Artificial Sequence
  Cyclic GFR-binding peptide
  MOD_RES (14)..(15): Xaa is C or S
LYLMSIPETKVPAXX

SEQ ID NO: 9220 - protein, 19 aa, Artificial Sequence
  Cyclic GFR-binding peptide
YTVVGKDKYLISIPSLKTP

SEQ ID NO: 9221 - protein, 14 aa, Artificial Sequence
  Cyclic GFR-binding peptide
  MOD_RES (14)..(14): Xaa is C or S
FYLMSIANLETPVX

SEQ ID NO: 9222 - protein, 16 aa, Artificial Sequence
  Cyclic GFR-binding peptide
  MOD_RES (14)..(15): Xaa is C or S
YYLISTASMKEPVXXP

SEQ ID NO: 9223 - protein, 18 aa, Artificial Sequence
  Cyclic GFR-binding peptide
VVNNASDFYLINIPSLRT

SEQ ID NO: 9224 - protein, 20 aa, Artificial Sequence
  Cyclic GFR-binding peptide
  MOD_RES (14)..(15): Xaa is C or S
FYLISIANLDQPVXXPSASA

SEQ ID NO: 9225 - protein, 19 aa, Artificial Sequence
  Cyclic GFR-binding peptide
VVNNASDYYLISTASLRTP

SEQ ID NO: 9226 - protein, 15 aa, Artificial Sequence
  Cyclic GFR-binding peptide
  MOD_RES (14)..(15): Xaa is C or S
YYLISTASLKTPVXX

SEQ ID NO: 9227 - protein, 27 aa, Artificial Sequence
  Cyclic GFR-binding peptide
  MOD_RES (21)..(22): Xaa is C or S
VVNNASDYYLISTASLRTPVXXTPPTS

SEQ ID NO: 9228 - protein, 15 aa, Artificial Sequence
  Cyclic GFR-binding peptide
YTVVGKDYYLISTAS

SEQ ID NO: 9229 - protein, 14 aa, Artificial Sequence
  Cyclic GFR-binding peptide
  MOD_RES (14)..(14): Xaa is C or S
FYLVSIANLKTPVX

SEQ ID NO: 9230 - protein, 16 aa, Artificial Sequence
  Cyclic GFR-binding peptide
IVNNSSDKYLVSIPSL

SEQ ID NO: 9231 - protein, 19 aa, Artificial Sequence
  Cyclic GFR-binding peptide
  MOD_RES (14)..(15): Xaa is C or S
LYLMSIPELETPVXXAKPI

SEQ ID NO: 9232 - protein, 15 aa, Artificial Sequence
  Cyclic GFR-binding peptide
  MOD_RES (14)..(15): Xaa is C or S
YYLVSTASLQTPAXX

SEQ ID NO: 9233 - protein, 17 aa, Artificial Sequence
  Cyclic GFR-binding peptide
IKPTKGIYYLISTASLD

SEQ ID NO: 9234 - protein, 17 aa, Artificial Sequence
  Cyclic GFR-binding peptide
LLVRGNDYYLMSTASTK

SEQ ID NO: 9235 - protein, 17 aa, Artificial Sequence
  Cyclic GFR-binding peptide
VVNKNEDLYLISIPEMK

SEQ ID NO: 9236 - protein, 13 aa, Artificial Sequence
  Cyclic GFR-binding peptide
LYLISIPELRTPV

SEQ ID NO: 9237 - protein, 19 aa, Artificial Sequence
  Cyclic GFR-binding peptide
IVNSSDDYYLVSTASLQTP

SEQ ID NO: 9238 - protein, 15 aa, Artificial Sequence
  Cyclic GFR-binding peptide
IKPTKGIKYLISIPS

SEQ ID NO: 9239 - protein, 19 aa, Artificial Sequence
  Cyclic GFR-binding peptide
IVNSSDDYYLVSTASLKTP

SEQ ID NO: 9240 - protein, 18 aa, Artificial Sequence
  Cyclic GFR-binding peptide
IKPTKGIFYLISIANLDQ

SEQ ID NO: 9241 - protein, 20 aa, Artificial Sequence
  Cyclic GFR-binding peptide
  MOD_RES (14)..(14): Xaa is C or S
KYLVSIPSLKTPAXTPKTVH

SEQ ID NO: 9242 - protein, 19 aa, Artificial Sequence
  Cyclic GFR-binding peptide
  MOD_RES (14)..(14): Xaa is C or S
YYLVSTASLKTPAXTPKTV

SEQ ID NO: 9243 - protein, 16 aa, Artificial Sequence
  Cyclic GFR-binding peptide
VVKDYEDFYLMNIPSL

SEQ ID NO: 9244 - protein, 17 aa, Artificial Sequence
  Cyclic GFR-binding peptide
  MOD_RES (14)..(15): Xaa is C or S
FYLISIANLRTPVXXTP

SEQ ID NO: 9245 - protein, 16 aa, Artificial Sequence
  Cyclic GFR-binding peptide
  MOD_RES (14)..(15): Xaa is C or S
LYLMSIPEMKTPTXXP

SEQ ID NO: 9246 - protein, 17 aa, Artificial Sequence
  Cyclic GFR-binding peptide
  MOD_RES (14)..(15): Xaa is C or S
KYLISIPSLKTPVXXAK

SEQ ID NO: 9247 - protein, 20 aa, Artificial Sequence
  Cyclic GFR-binding peptide
  MOD_RES (14)..(15): Xaa is C or S
YYLISTASLKTPVXXAKSAK

SEQ ID NO: 9248 - protein, 16 aa, Artificial Sequence
  Cyclic GFR-binding peptide
YTVVGKDKYLISIPSL

SEQ ID NO: 9249 - protein, 18 aa, Artificial Sequence
  Cyclic GFR-binding peptide
IVNSSDDFYLVNIPSLQT

SEQ ID NO: 9250 - protein, 18 aa, Artificial Sequence
  Cyclic GFR-binding peptide
IVNSSDDFYLVNIPSLKT

SEQ ID NO: 9251 - protein, 27 aa, Artificial Sequence
  Cyclic GFR-binding peptide
  MOD_RES (21)..(22): Xaa is C or S
IIQQKDNFYLMSIANMKTPTXXPGASG

SEQ ID NO: 9252 - protein, 16 aa, Artificial Sequence
  Cyclic GFR-binding peptide
VVNNAADYYLISTASL

SEQ ID NO: 9253 - protein, 14 aa, Artificial Sequence
  Cyclic GFR-binding peptide
  MOD_RES (14)..(14): Xaa is C or S
FYLINIPSLRAPVX

SEQ ID NO: 9254 - protein, 27 aa, Artificial Sequence
  Cyclic GFR-binding peptide
  MOD_RES (21)..(22): Xaa is C or S
IKPTKGIYYLISTASLDQSVXXPSASA

SEQ ID NO: 9255 - protein, 18 aa, Artificial Sequence
  Cyclic GFR-binding peptide
  MOD_RES (14)..(15): Xaa is C or S
YYLISTASMKEPVXXPEP

SEQ ID NO: 9256 - protein, 17 aa, Artificial Sequence
  Cyclic GFR-binding peptide
  MOD_RES (14)..(15): Xaa is C or S
FYLISIANLDQSVXXPS

SEQ ID NO: 9257 - protein, 19 aa, Artificial Sequence
  Cyclic GFR-binding peptide
VVKDYEDFYLMSIANLETP

SEQ ID NO: 9258 - protein, 18 aa, Artificial Sequence
  Cyclic GFR-binding peptide
  MOD_RES (14)..(15): Xaa is C or S
KYLMSIPSLETPVXXAKP

SEQ ID NO: 9259 - protein, 27 aa, Artificial Sequence
  Cyclic GFR-binding peptide
  MOD_RES (21)..(22): Xaa is C or S
TPVGMDDFYLVSIANLKTPVXXAKGVK

SEQ ID NO: 9260 - protein, 18 aa, Artificial Sequence
  Cyclic GFR-binding peptide
  MOD_RES (14)..(15): Xaa is C or S
KYLISIPSLDQSVXXPSA

SEQ ID NO: 9261 - protein, 19 aa, Artificial Sequence
  Cyclic GFR-binding peptide
  MOD_RES (14)..(15): Xaa is C or S
YYLISTASLDQSVXXPSAS

SEQ ID NO: 9262 - protein, 17 aa, Artificial Sequence
  Cyclic GFR-binding peptide
  MOD_RES (14)..(15): Xaa is C or S
LYLMSIPETKVPAXXTS

SEQ ID NO: 9263 - protein, 19 aa, Artificial Sequence
  Cyclic GFR-binding peptide
  MOD_RES (14)..(15): Xaa is C or S
YYLISTASMKEPVXXPEPI

SEQ ID NO: 9264 - protein, 18 aa, Artificial Sequence
  Cyclic GFR-binding peptide
  MOD_RES (14)..(15): Xaa is C or S
YYLISTASLRTPVXXTPP

SEQ ID NO: 9265 - protein, 15 aa, Artificial Sequence
  Cyclic GFR-binding peptide
  MOD_RES (14)..(15): Xaa is C or S
LYLVSIPELKTPAXX

SEQ ID NO: 9266 - protein, 16 aa, Artificial Sequence
  Cyclic GFR-binding peptide
IIQQKDNFYLMSIANM

SEQ ID NO: 9267 - protein, 17 aa, Artificial Sequence
  Cyclic GFR-binding peptide
IKPTKGIFYLINIPSLD

SEQ ID NO: 9268 - protein, 15 aa, Artificial Sequence
  Cyclic GFR-binding peptide
VVKENEDLYLMSIPE

SEQ ID NO: 9269 - protein, 17 aa, Artificial Sequence
  Cyclic GFR-binding peptide
  MOD_RES (14)..(15): Xaa is C or S
LYLISIPEMKEPVXXPE

SEQ ID NO: 9270 - protein, 15 aa, Artificial Sequence
  Cyclic GFR-binding peptide
  MOD_RES (14)..(15): Xaa is C or S
FYLMSIANTKVPAXX

SEQ ID NO: 9271 - protein, 17 aa, Artificial Sequence
  Cyclic GFR-binding peptide
LLVRGNDFYLMNIPSTK

SEQ ID NO: 9272 - protein, 18 aa, Artificial Sequence
  Cyclic GFR-binding peptide
VKPKRGVYYLISTASLAQ

SEQ ID NO: 9273 - protein, 16 aa, Artificial Sequence
  Cyclic GFR-binding peptide
TPVGMDDFYLVSIANL

SEQ ID NO: 9274 - protein, 27 aa, Artificial Sequence
  Cyclic GFR-binding peptide
  MOD_RES (21)..(22): Xaa is C or S
VVNNAADFYLINIPSLRAPVXXSAPAA

SEQ ID NO: 9275 - protein, 19 aa, Artificial Sequence
  Cyclic GFR-binding peptide
  MOD_RES (14)..(15): Xaa is C or S
LYLVSIPELKTPAXXPKPV

SEQ ID NO: 9276 - protein, 17 aa, Artificial Sequence
  Cyclic GFR-binding peptide
  MOD_RES (14)..(15): Xaa is C or S
LYLISIPELRAPVXXSA

SEQ ID NO: 9277 - protein, 27 aa, Artificial Sequence
  Cyclic GFR-binding peptide
  MOD_RES (21)..(22): Xaa is C or S
VVNNASDFYLINIPSLRTPVXXTPPTS

SEQ ID NO: 9278 - protein, 15 aa, Artificial Sequence
  Cyclic GFR-binding peptide
  MOD_RES (14)..(15): Xaa is C or S
KYLMSIPSTKVPAXX

SEQ ID NO: 9279 - protein, 13 aa, Artificial Sequence
  Cyclic GFR-binding peptide
FYLINIPSLKTPV

SEQ ID NO: 9280 - protein, 19 aa, Artificial Sequence
  Cyclic GFR-binding peptide
  MOD_RES (14)..(14): Xaa is C or S
FYLVNIPSLKTPAXTPKTV

SEQ ID NO: 9281 - protein, 16 aa, Artificial Sequence
  Cyclic GFR-binding peptide
YTVVGKDLYLISIPEL

SEQ ID NO: 9282 - protein, 19 aa, Artificial Sequence
  Cyclic GFR-binding peptide
VKPKRGVFYLINIPSLAQP

SEQ ID NO: 9283 - protein, 17 aa, Artificial Sequence
  Cyclic GFR-binding peptide
VVKENEDKYLMSIPSLE

SEQ ID NO: 9284 - protein, 19 aa, Artificial Sequence
  Cyclic GFR-binding peptide
  MOD_RES (14)..(15): Xaa is C or S
LYLVSIPELKTPVXXAKGV

SEQ ID NO: 9285 - protein, 13 aa, Artificial Sequence
  Cyclic GFR-binding peptide
YYLISTASLDQSV

SEQ ID NO: 9286 - protein, 14 aa, Artificial Sequence
  Cyclic GFR-binding peptide
  MOD_RES (14)..(14): Xaa is C or S
FYLVNIPSLKTPVX

SEQ ID NO: 9287 - protein, 20 aa, Artificial Sequence
  Cyclic GFR-binding peptide
  MOD_RES (14)..(15): Xaa is C or S
YYLVSTASLQTPAXXPKPVT

SEQ ID NO: 9288 - protein, 16 aa, Artificial Sequence
  Cyclic GFR-binding peptide
  MOD_RES (14)..(15): Xaa is C or S
LYLISIPELDQPVXXP

SEQ ID NO: 9289 - protein, 20 aa, Artificial Sequence
  Cyclic GFR-binding peptide
  MOD_RES (14)..(15): Xaa is C or S
FYLMNIPSLETPVXXAKPIK

SEQ ID NO: 9290 - protein, 14 aa, Artificial Sequence
  Cyclic GFR-binding peptide
  MOD_RES (14)..(14): Xaa is C or S
LYLISIPELRTPVX

SEQ ID NO: 9291 - protein, 27 aa, Artificial Sequence
  Cyclic GFR-binding peptide
  MOD_RES (21)..(21): Xaa is C or S
IVNSSDDFYLVNIPSLKTPAXTPKTVH

SEQ ID NO: 9292 - protein, 17 aa, Artificial Sequence
  Cyclic GFR-binding peptide
IIQQKDNKYLMSIPSMK

SEQ ID NO: 9293 - protein, 17 aa, Artificial Sequence
  Cyclic GFR-binding peptide
VVNNASDLYLISIPELR

SEQ ID NO: 9294 - protein, 27 aa, Artificial Sequence
  Cyclic GFR-binding peptide
  MOD_RES (21)..(22): Xaa is C or S
VVKENEDFYLMNIPSLETPVXXAKPIK

SEQ ID NO: 9295 - protein, 18 aa, Artificial Sequence
  Cyclic GFR-binding peptide
IVNNSSDFYLVSIANLKT

SEQ ID NO: 9296 - protein, 18 aa, Artificial Sequence
  Cyclic GFR-binding peptide
VKPTRGVFYLINIPSLDQ

SEQ ID NO: 9297 - protein, 16 aa, Artificial Sequence
  Cyclic GFR-binding peptide
VVKENEDFYLMSIANL

SEQ ID NO: 9298 - protein, 27 aa, Artificial Sequence
  Cyclic GFR-binding peptide
  MOD_RES (21)..(22): Xaa is C or S
YTVVGKDLYLISIPELKTPVXXAKSAK

SEQ ID NO: 9299 - protein, 20 aa, Artificial Sequence
  Cyclic GFR-binding peptide
  MOD_RES (14)..(15): Xaa is C or S
LYLISIPELDQSVXXPSASA

SEQ ID NO: 9300 - protein, 16 aa, Artificial Sequence
  Cyclic GFR-binding peptide
VKPTRGVLYLISIPEL

SEQ ID NO: 9301 - protein, 15 aa, Artificial Sequence
  Cyclic GFR-binding peptide
VVNNAADFYLISIAN

SEQ ID NO: 9302 - protein, 17 aa, Artificial Sequence
  Cyclic GFR-binding peptide
TPVGMDDKYLVSIPSLK

SEQ ID NO: 9303 - protein, 18 aa, Artificial Sequence
  Cyclic GFR-binding peptide
  MOD_RES (14)..(15): Xaa is C or S
FYLVNIPSLQTPAXXPKP

SEQ ID NO: 9304 - protein, 15 aa, Artificial Sequence
  Cyclic GFR-binding peptide
  MOD_RES (14)..(15): Xaa is C or S
FYLISIANMKEPVXX

SEQ ID NO: 9305 - protein, 13 aa, Artificial Sequence
  Cyclic GFR-binding peptide
FYLISIANLRAPV

SEQ ID NO: 9306 - protein, 15 aa, Artificial Sequence
  Cyclic GFR-binding peptide
VVKENEDKYLMSIPS

SEQ ID NO: 9307 - protein, 18 aa, Artificial Sequence
  Cyclic GFR-binding peptide
VVNNAADFYLINIPSLRA

SEQ ID NO: 9308 - protein, 20 aa, Artificial Sequence
  Cyclic GFR-binding peptide
  MOD_RES (14)..(15): Xaa is C or S
LYLMSIPELETPVXXAKPIS

SEQ ID NO: 9309 - protein, 20 aa, Artificial Sequence
  Cyclic GFR-binding peptide
  MOD_RES (14)..(15): Xaa is C or S
LYLISIPELRAPVXXSAPAA

SEQ ID NO: 9310 - protein, 20 aa, Artificial Sequence
  Cyclic GFR-binding peptide
  MOD_RES (14)..(14): Xaa is C or S
LYLVSIPELKTPAXTPKTVH

SEQ ID NO: 9311 - protein, 15 aa, Artificial Sequence
  Cyclic GFR-binding peptide
  MOD_RES (14)..(15): Xaa is C or S
KYLISIPSLRAPVXX

SEQ ID NO: 9312 - protein, 15 aa, Artificial Sequence
  Cyclic GFR-binding peptide
VVKDYEDYYLMSTAS

SEQ ID NO: 9313 - protein, 20 aa, Artificial Sequence
  Cyclic GFR-binding peptide
  MOD_RES (14)..(15): Xaa is C or S
FYLVNIPSLKTPAXXPKPVH

SEQ ID NO: 9314 - protein, 16 aa, Artificial Sequence
  Cyclic GFR-binding peptide
IVNNSSDFYLVNIPSL

SEQ ID NO: 9315 - protein, 19 aa, Artificial Sequence
  Cyclic GFR-binding peptide
  MOD_RES (14)..(15): Xaa is C or S
YYLVSTASLQTPAXXPKPV

SEQ ID NO: 9316 - protein, 15 aa, Artificial Sequence
  Cyclic GFR-binding peptide
IVNNSSDFYLVNIPS

SEQ ID NO: 9317 - protein, 17 aa, Artificial Sequence
  Cyclic GFR-binding peptide
  MOD_RES (14)..(15): Xaa is C or S
KYLMSIPSMKTPTXXPG

SEQ ID NO: 9318 - protein, 14 aa, Artificial Sequence
  Cyclic GFR-binding peptide
  MOD_RES (14)..(14): Xaa is C or S
KYLMSIPSTKVPAX

SEQ ID NO: 9319 - protein, 15 aa, Artificial Sequence
  Cyclic GFR-binding peptide
  MOD_RES (14)..(14): Xaa is C or S
LYLVSIPELKTPAXT

SEQ ID NO: 9320 - protein, 20 aa, Artificial Sequence
  Cyclic GFR-binding peptide
  MOD_RES (14)..(15): Xaa is C or S
LYLISIPEMKEPVXXPEPIG

SEQ ID NO: 9321 - protein, 19 aa, Artificial Sequence
  Cyclic GFR-binding peptide
  MOD_RES (14)..(15): Xaa is C or S
KYLISIPSLRTPVXXTPPT

SEQ ID NO: 9322 - protein, 17 aa, Artificial Sequence
  Cyclic GFR-binding peptide
  MOD_RES (14)..(15): Xaa is C or S
FYLMNIPSLETPVXXAK

SEQ ID NO: 9323 - protein, 17 aa, Artificial Sequence
  Cyclic GFR-binding peptide
  MOD_RES (14)..(15): Xaa is C or S
FYLISIANLDQPVXXPS

SEQ ID NO: 9324 - protein, 17 aa, Artificial Sequence
  Cyclic GFR-binding peptide
YTVVGKDLYLISIPELK

SEQ ID NO: 9325 - protein, 15 aa, Artificial Sequence
  Cyclic GFR-binding peptide
  MOD_RES (14)..(15): Xaa is C or S
FYLINIPSLKTPVXX

SEQ ID NO: 9326 - protein, 19 aa, Artificial Sequence
  Cyclic GFR-binding peptide
TPVGMDDLYLVSIPELKTP

SEQ ID NO: 9327 - protein, 17 aa, Artificial Sequence
  Cyclic GFR-binding peptide
IIQQKDNLYLMSIPEMK

SEQ ID NO: 9328 - protein, 17 aa, Artificial Sequence
  Cyclic GFR-binding peptide
VKPKRGVFYLINIPSLA

SEQ ID NO: 9329 - protein, 17 aa, Artificial Sequence
  Cyclic GFR-binding peptide
VVNNASDKYLISIPSLR

SEQ ID NO: 9330 - protein, 20 aa, Artificial Sequence
  Cyclic GFR-binding peptide
  MOD_RES (14)..(15): Xaa is C or S
FYLINIPSLDQSVXXPSASA

SEQ ID NO: 9331 - protein, 16 aa, Artificial Sequence
  Cyclic GFR-binding peptide
  MOD_RES (14)..(15): Xaa is C or S
FYLINIPSLDQPVXXP

SEQ ID NO: 9332 - protein, 18 aa, Artificial Sequence
  Cyclic GFR-binding peptide
  MOD_RES (14)..(15): Xaa is C or S
FYLISIANLRAPVXXSAP

SEQ ID NO: 9333 - protein, 19 aa, Artificial Sequence
  Cyclic GFR-binding peptide
  MOD_RES (14)..(15): Xaa is C or S
YYLISTASLRAPVXXSAPA

SEQ ID NO: 9334 - protein, 19 aa, Artificial Sequence
  Cyclic GFR-binding peptide
VVKENEDLYLMSIPELETP

SEQ ID NO: 9335 - protein, 27 aa, Artificial Sequence
  Cyclic GFR-binding peptide
  MOD_RES (21)..(22): Xaa is C or S
TPVGMDDYYLVSTASLKTPVXXAKGVK

SEQ ID NO: 9336 - protein, 14 aa, Artificial Sequence
  Cyclic GFR-binding peptide
  MOD_RES (14)..(14): Xaa is C or S
FYLMSIANTKVPAX

SEQ ID NO: 9337 - protein, 18 aa, Artificial Sequence
  Cyclic GFR-binding peptide
  MOD_RES (14)..(15): Xaa is C or S
FYLMSIANLETPVXXAKP

SEQ ID NO: 9338 - protein, 15 aa, Artificial Sequence
  Cyclic GFR-binding peptide
TPVGMDDKYLVSIPS

SEQ ID NO: 9339 - protein, 13 aa, Artificial Sequence
  Cyclic GFR-binding peptide
YYLISTASLAQPV

SEQ ID NO: 9340 - protein, 13 aa, Artificial Sequence
  Cyclic GFR-binding peptide
LYLVSIPELKTPV

SEQ ID NO: 9341 - protein, 18 aa, Artificial Sequence
  Cyclic GFR-binding peptide
VVKDYEDKYLMSIPSLET

SEQ ID NO: 9342 - protein, 15 aa, Artificial Sequence
  Cyclic GFR-binding peptide
VVNNAADKYLISIPS

SEQ ID NO: 9343 - protein, 18 aa, Artificial Sequence
  Cyclic GFR-binding peptide
  MOD_RES (14)..(15): Xaa is C or S
LYLMSIPEMKTPTXXPGA

SEQ ID NO: 9344 - protein, 13 aa, Artificial Sequence
  Cyclic GFR-binding peptide
KYLISIPSMKEPV

SEQ ID NO: 9345 - protein, 13 aa, Artificial Sequence
  Cyclic GFR-binding peptide
KYLISIPSLRAPV

SEQ ID NO: 9346 - protein, 16 aa, Artificial Sequence
  Cyclic GFR-binding peptide
IIQQKDNYYLMSTASM

SEQ ID NO: 9347 - protein, 15 aa, Artificial Sequence
  Cyclic GFR-binding peptide
  MOD_RES (14)..(15): Xaa is C or S
KYLISIPSMKEPVXX

SEQ ID NO: 9348 - protein, 15 aa, Artificial Sequence
  Cyclic GFR-binding peptide
  MOD_RES (14)..(15): Xaa is C or S
LYLVSIPELKTPVXX

SEQ ID NO: 9349 - protein, 19 aa, Artificial Sequence
  Cyclic GFR-binding peptide
IVNNSSDYYLVSTASLKTP

SEQ ID NO: 9350 - protein, 17 aa, Artificial Sequence
  Cyclic GFR-binding peptide
  MOD_RES (14)..(15): Xaa is C or S
KYLISIPSLAQPVXXPA

SEQ ID NO: 9351 - protein, 17 aa, Artificial Sequence
  Cyclic GFR-binding peptide
IIQQKDNFYLMSIANMK

SEQ ID NO: 9352 - protein, 13 aa, Artificial Sequence
  Cyclic GFR-binding peptide
FYLISIANMKEPV

SEQ ID NO: 9353 - protein, 18 aa, Artificial Sequence
  Cyclic GFR-binding peptide
  MOD_RES (14)..(15): Xaa is C or S
FYLVSIANLKTPVXXAKG

SEQ ID NO: 9354 - protein, 20 aa, Artificial Sequence
  Cyclic GFR-binding peptide
  MOD_RES (14)..(15): Xaa is C or S
YYLISTASLRTPVXXTPPTS

SEQ ID NO: 9355 - protein, 15 aa, Artificial Sequence
  Cyclic GFR-binding peptide
  MOD_RES (14)..(15): Xaa is C or S
FYLISIANLRAPVXX

SEQ ID NO: 9356 - protein, 15 aa, Artificial Sequence
  Cyclic GFR-binding peptide
  MOD_RES (14)..(15): Xaa is C or S
YYLISTASLAQPVXX

SEQ ID NO: 9357 - protein, 17 aa, Artificial Sequence
  Cyclic GFR-binding peptide
  MOD_RES (14)..(15): Xaa is C or S
FYLINIPSLRAPVXXSA

SEQ ID NO: 9358 - protein, 17 aa, Artificial Sequence
  Cyclic GFR-binding peptide
IVNNSSDFYLVNIPSLK

SEQ ID NO: 9359 - protein, 14 aa, Artificial Sequence
  Cyclic GFR-binding peptide
  MOD_RES (14)..(14): Xaa is C or S
FYLVNIPSLKTPAX

SEQ ID NO: 9360 - protein, 17 aa, Artificial Sequence
  Cyclic GFR-binding peptide
  MOD_RES (14)..(15): Xaa is C or S
FYLISIANLAQPVXXPA

SEQ ID NO: 9361 - protein, 15 aa, Artificial Sequence
  Cyclic GFR-binding peptide
VVNKNEDFYLISIAN

SEQ ID NO: 9362 - protein, 15 aa, Artificial Sequence
  Cyclic GFR-binding peptide
VVNKNEDYYLISTAS

SEQ ID NO: 9363 - protein, 19 aa, Artificial Sequence
  Cyclic GFR-binding peptide
VVNKNEDLYLISIPEMKEP

SEQ ID NO: 9364 - protein, 20 aa, Artificial Sequence
  Cyclic GFR-binding peptide
  MOD_RES (14)..(15): Xaa is C or S
FYLVNIPSLKTPAXXAKPVA

SEQ ID NO: 9365 - protein, 19 aa, Artificial Sequence
  Cyclic GFR-binding peptide
  MOD_RES (14)..(15): Xaa is C or S
FYLVNIPSLKTPAXXPKPV

SEQ ID NO: 9366 - protein, 18 aa, Artificial Sequence
  Cyclic GFR-binding peptide
VKPTRGVYYLISTASLDQ

SEQ ID NO: 9367 - protein, 19 aa, Artificial Sequence
  Cyclic GFR-binding peptide
IVNNSSDFYLVSIANLKTP

SEQ ID NO: 9368 - protein, 19 aa, Artificial Sequence
  Cyclic GFR-binding peptide
TPVGMDDKYLVSIPSLKTP

SEQ ID NO: 9369 - protein, 20 aa, Artificial Sequence
  Cyclic GFR-binding peptide
  MOD_RES (14)..(15): Xaa is C or S
FYLINIPSMKEPVXXPEPIG

SEQ ID NO: 9370 - protein, 18 aa, Artificial Sequence
  Cyclic GFR-binding peptide
  MOD_RES (14)..(15): Xaa is C or S
KYLISIPSLDQPVXXPSA

SEQ ID NO: 9371 - protein, 13 aa, Artificial Sequence
  Cyclic GFR-binding peptide
FYLVNIPSLKTPA

SEQ ID NO: 9372 - protein, 19 aa, Artificial Sequence
  Cyclic GFR-binding peptide
  MOD_RES (14)..(15): Xaa is C or S
LYLMSIPETKVPAXXTSPV

SEQ ID NO: 9373 - protein, 20 aa, Artificial Sequence
  Cyclic GFR-binding peptide
  MOD_RES (14)..(15): Xaa is C or S
KYLMSIPSTKVPAXXTSPVR

SEQ ID NO: 9374 - protein, 16 aa, Artificial Sequence
  Cyclic GFR-binding peptide
  MOD_RES (14)..(15): Xaa is C or S
FYLINIPSLRAPVXXS

SEQ ID NO: 9375 - protein, 19 aa, Artificial Sequence
  Cyclic GFR-binding peptide
  MOD_RES (14)..(15): Xaa is C or S
YYLISTASLAQPVXXPAAS

SEQ ID NO: 9376 - protein, 17 aa, Artificial Sequence
  Cyclic GFR-binding peptide
  MOD_RES (14)..(15): Xaa is C or S
FYLVSIANLKTPAXXAK

SEQ ID NO: 9377 - protein, 17 aa, Artificial Sequence
  Cyclic GFR-binding peptide
  MOD_RES (14)..(15): Xaa is C or S
KYLISIPSLDQPVXXPS

SEQ ID NO: 9378 - protein, 17 aa, Artificial Sequence
  Cyclic GFR-binding peptide
VVKDYEDYYLMSTASLE

SEQ ID NO: 9379 - protein, 27 aa, Artificial Sequence
  Cyclic GFR-binding peptide
  MOD_RES (21)..(22): Xaa is C or S
VVKDYEDFYLMNIPSLETPVXXAKPIS

SEQ ID NO: 9380 - protein, 19 aa, Artificial Sequence
  Cyclic GFR-binding peptide
  MOD_RES (14)..(15): Xaa is C or S
YYLISTASLDQPVXXPSAS

SEQ ID NO: 9381 - protein, 16 aa, Artificial Sequence
  Cyclic GFR-binding peptide
  MOD_RES (14)..(15): Xaa is C or S
KYLISIPSLAQPVXXP

SEQ ID NO: 9382 - protein, 16 aa, Artificial Sequence
  Cyclic GFR-binding peptide
  MOD_RES (14)..(15): Xaa is C or S
LYLVSIPELQTPAXXP

SEQ ID NO: 9383 - protein, 17 aa, Artificial Sequence
  Cyclic GFR-binding peptide
TPVGMDDLYLVSIPELK

SEQ ID NO: 9384 - protein, 14 aa, Artificial Sequence
  Cyclic GFR-binding peptide
  MOD_RES (14)..(14): Xaa is C or S
KYLISIPSMKEPVX

SEQ ID NO: 9385 - protein, 14 aa, Artificial Sequence
  Cyclic GFR-binding peptide
  MOD_RES (14)..(14): Xaa is C or S
FYLINIPSLRTPVX

SEQ ID NO: 9386 - protein, 16 aa, Artificial Sequence
  Cyclic GFR-binding peptide
  MOD_RES (14)..(15): Xaa is C or S
YYLVSTASLKTPAXXP

SEQ ID NO: 9387 - protein, 20 aa, Artificial Sequence
  Cyclic GFR-binding peptide
  MOD_RES (14)..(15): Xaa is C or S
FYLINIPSLKTPVXXAKSAK

SEQ ID NO: 9388 - protein, 16 aa, Artificial Sequence
  Cyclic GFR-binding peptide
IIQQKDNLYLMSIPEM

SEQ ID NO: 9389 - protein, 18 aa, Artificial Sequence
  Cyclic GFR-binding peptide
VVKDYEDLYLMSIPELET

SEQ ID NO: 9390 - protein, 18 aa, Artificial Sequence
  Cyclic GFR-binding peptide
IVNNSSDLYLVSIPELKT

SEQ ID NO: 9391 - protein, 17 aa, Artificial Sequence
  Cyclic GFR-binding peptide
  MOD_RES (14)..(15): Xaa is C or S
FYLVSIANLKTPVXXAK

SEQ ID NO: 9392 - protein, 27 aa, Artificial Sequence
  Cyclic GFR-binding peptide
  MOD_RES (21)..(22): Xaa is C or S
IVNSSDDLYLVSIPELKTPAXXPKPVY

SEQ ID NO: 9393 - protein, 15 aa, Artificial Sequence
  Cyclic GFR-binding peptide
YTVVGKDLYLISIPE

SEQ ID NO: 9394 - protein, 15 aa, Artificial Sequence
  Cyclic GFR-binding peptide
  MOD_RES (14)..(15): Xaa is C or S
FYLMSIANMKTPTXX

SEQ ID NO: 9395 - protein, 27 aa, Artificial Sequence
  Cyclic GFR-binding peptide
  MOD_RES (21)..(22): Xaa is C or S
TPVGMDDKYLVSIPSLKTPVXXAKGVK

SEQ ID NO: 9396 - protein, 15 aa, Artificial Sequence
  Cyclic GFR-binding peptide
VVKDYEDFYLMNIPS

SEQ ID NO: 9397 - protein, 17 aa, Artificial Sequence
  Cyclic GFR-binding peptide
IVNNSSDYYLVSTASLK

SEQ ID NO: 9398 - protein, 27 aa, Artificial Sequence
  Cyclic GFR-binding peptide
  MOD_RES (21)..(22): Xaa is C or S
IKPTKGIKYLISIPSLDQSVXXPSASA

SEQ ID NO: 9399 - protein, 18 aa, Artificial Sequence
  Cyclic GFR-binding peptide
VVNKNEDLYLISIPEMKE

SEQ ID NO: 9400 - protein, 17 aa, Artificial Sequence
  Cyclic GFR-binding peptide
  MOD_RES (14)..(15): Xaa is C or S
LYLVSIPELKTPAXXPK

SEQ ID NO: 9401 - protein, 15 aa, Artificial Sequence
  Cyclic GFR-binding peptide
  MOD_RES (14)..(15): Xaa is C or S
FYLISIANLDQPVXX

SEQ ID NO: 9402 - protein, 17 aa, Artificial Sequence
  Cyclic GFR-binding peptide
  MOD_RES (14)..(15): Xaa is C or S
FYLINIPSMKEPVXXPE

SEQ ID NO: 9403 - protein, 14 aa, Artificial Sequence
  Cyclic GFR-binding peptide
  MOD_RES (14)..(14): Xaa is C or S
KYLMSIPSLETPVX

SEQ ID NO: 9404 - protein, 18 aa, Artificial Sequence
  Cyclic GFR-binding peptide
  MOD_RES (14)..(15): Xaa is C or S
FYLISIANMKEPVXXPEP

SEQ ID NO: 9405 - protein, 16 aa, Artificial Sequence
  Cyclic GFR-binding peptide
VVNNAADFYLINIPSL

SEQ ID NO: 9406 - protein, 15 aa, Artificial Sequence
  Cyclic GFR-binding peptide
  MOD_RES (14)..(15): Xaa is C or S
KYLISIPSLRTPVXX

SEQ ID NO: 9407 - protein, 17 aa, Artificial Sequence
  Cyclic GFR-binding peptide
  MOD_RES (14)..(15): Xaa is C or S
YYLISTASLDQSVXXPS

SEQ ID NO: 9408 - protein, 18 aa, Artificial Sequence
  Cyclic GFR-binding peptide
IVNSSDDYYLVSTASLKT

SEQ ID NO: 9409 - protein, 17 aa, Artificial Sequence
  Cyclic GFR-binding peptide
VVNNASDFYLISIANLR

SEQ ID NO: 9410 - protein, 19 aa, Artificial Sequence
  Cyclic GFR-binding peptide
IIQQKDNLYLMSIPEMKTP

SEQ ID NO: 9411 - protein, 16 aa, Artificial Sequence
  Cyclic GFR-binding peptide
  MOD_RES (14)..(15): Xaa is C or S
FYLISIANLRTPVXXT

SEQ ID NO: 9412 - protein, 18 aa, Artificial Sequence
  Cyclic GFR-binding peptide
IVNSSDDYYLVSTASLQT

SEQ ID NO: 9413 - protein, 17 aa, Artificial Sequence
  Cyclic GFR-binding peptide
VVKENEDFYLMSIANLE

SEQ ID NO: 9414 - protein, 20 aa, Artificial Sequence
  Cyclic GFR-binding peptide
  MOD_RES (14)..(15): Xaa is C or S
YYLMSTASMKTPTXXPGASG

SEQ ID NO: 9415 - protein, 16 aa, Artificial Sequence
  Cyclic GFR-binding peptide
  MOD_RES (14)..(15): Xaa is C or S
FYLINIPSMKEPVXXP

SEQ ID NO: 9416 - protein, 16 aa, Artificial Sequence
  Cyclic GFR-binding peptide
VVKENEDLYLMSIPEL

SEQ ID NO: 9417 - protein, 18 aa, Artificial Sequence
  Cyclic GFR-binding peptide
  MOD_RES (14)..(15): Xaa is C or S
LYLISIPELDQPVXXPSA

SEQ ID NO: 9418 - protein, 27 aa, Artificial Sequence
  Cyclic GFR-binding peptide
  MOD_RES (21)..(22): Xaa is C or S
IKPTKGIFYLINIPSLDQSVXXPSASA

SEQ ID NO: 9419 - protein, 20 aa, Artificial Sequence
  Cyclic GFR-binding peptide
  MOD_RES (14)..(15): Xaa is C or S
LYLISIPELAQPVXXPAASA

SEQ ID NO: 9420 - protein, 17 aa, Artificial Sequence
  Cyclic GFR-binding peptide
VVKENEDLYLMSIPELE

SEQ ID NO: 9421 - protein, 16 aa, Artificial Sequence
  Cyclic GFR-binding peptide
LLVRGNDFYLMNIPST

SEQ ID NO: 9422 - protein, 16 aa, Artificial Sequence
  Cyclic GFR-binding peptide
TPVGMDDKYLVSIPSL

SEQ ID NO: 9423 - protein, 19 aa, Artificial Sequence
  Cyclic GFR-binding peptide
IVNNSSDFYLVNIPSLKTP

SEQ ID NO: 9424 - protein, 19 aa, Artificial Sequence
  Cyclic GFR-binding peptide
IVNSSDDFYLVNIPSLKTP

SEQ ID NO: 9425 - protein, 13 aa, Artificial Sequence
  Cyclic GFR-binding peptide
KYLISIPSLRTPV

SEQ ID NO: 9426 - protein, 16 aa, Artificial Sequence
  Cyclic GFR-binding peptide
  MOD_RES (14)..(15): Xaa is C or S
FYLVNIPSLKTPVXXA

SEQ ID NO: 9427 - protein, 15 aa, Artificial Sequence
  Cyclic GFR-binding peptide
VVNNAADYYLISTAS

SEQ ID NO: 9428 - protein, 27 aa, Artificial Sequence
  Cyclic GFR-binding peptide
  MOD_RES (21)..(22): Xaa is C or S
VKPTRGVLYLISIPELDQPVXXPSASA

SEQ ID NO: 9429 - protein, 15 aa, Artificial Sequence
  Cyclic GFR-binding peptide
VVNKNEDFYLINIPS

SEQ ID NO: 9430 - protein, 19 aa, Artificial Sequence
  Cyclic GFR-binding peptide
IVNSSDDFYLVNIPSLQTP

SEQ ID NO: 9431 - protein, 15 aa, Artificial Sequence
  Cyclic GFR-binding peptide
IIQQKDNFYLMNIPS

SEQ ID NO: 9432 - protein, 17 aa, Artificial Sequence
  Cyclic GFR-binding peptide
  MOD_RES (14)..(15): Xaa is C or S
LYLMSIPELETPVXXAK

SEQ ID NO: 9433 - protein, 15 aa, Artificial Sequence
  Cyclic GFR-binding peptide
VKPTRGVLYLISIPE

SEQ ID NO: 9434 - protein, 16 aa, Artificial Sequence
  Cyclic GFR-binding peptide
VVKDYEDYYLMSTASL

SEQ ID NO: 9435 - protein, 19 aa, Artificial Sequence
  Cyclic GFR-binding peptide
  MOD_RES (14)..(15): Xaa is C or S
YYLISTASLKTPVXXAKSA

SEQ ID NO: 9436 - protein, 15 aa, Artificial Sequence
  Cyclic GFR-binding peptide
  MOD_RES (14)..(14): Xaa is C or S
KYLVSIPSLKTPAXT

SEQ ID NO: 9437 - protein, 18 aa, Artificial Sequence
  Cyclic GFR-binding peptide
VVKDYEDFYLMSIANLET

SEQ ID NO: 9438 - protein, 16 aa, Artificial Sequence
  Cyclic GFR-binding peptide
  MOD_RES (14)..(15): Xaa is C or S
FYLINIPSLKTPVXXA

SEQ ID NO: 9439 - protein, 14 aa, Artificial Sequence
  Cyclic GFR-binding peptide
  MOD_RES (14)..(14): Xaa is C or S
FYLISIANLDQSVX

SEQ ID NO: 9440 - protein, 13 aa, Artificial Sequence
  Cyclic GFR-binding peptide
LYLVSIPELKTPA

SEQ ID NO: 9441 - protein, 15 aa, Artificial Sequence
  Cyclic GFR-binding peptide
  MOD_RES (14)..(15): Xaa is C or S
KYLMSIPSLETPVXX

SEQ ID NO: 9442 - protein, 16 aa, Artificial Sequence
  Cyclic GFR-binding peptide
TPVGMDDLYLVSIPEL

SEQ ID NO: 9443 - protein, 14 aa, Artificial Sequence
  Cyclic GFR-binding peptide
  MOD_RES (14)..(14): Xaa is C or S
FYLISIANLDQPVX

SEQ ID NO: 9444 - protein, 13 aa, Artificial Sequence
  Cyclic GFR-binding peptide
FYLISIANLDQPV

SEQ ID NO: 9445 - protein, 17 aa, Artificial Sequence
  Cyclic GFR-binding peptide
  MOD_RES (14)..(15): Xaa is C or S
FYLVSIANLQTPAXXPK

SEQ ID NO: 9446 - protein, 15 aa, Artificial Sequence
  Cyclic GFR-binding peptide
  MOD_RES (14)..(15): Xaa is C or S
YYLISTASLDQSVXX

SEQ ID NO: 9447 - protein, 15 aa, Artificial Sequence
  Cyclic GFR-binding peptide
  MOD_RES (14)..(15): Xaa is C or S
FYLVNIPSLKTPAXX

SEQ ID NO: 9448 - protein, 15 aa, Artificial Sequence
  Cyclic GFR-binding peptide
IVNNSSDFYLVSIAN

SEQ ID NO: 9449 - protein, 16 aa, Artificial Sequence
  Cyclic GFR-binding peptide
VVKENEDKYLMSIPSL

SEQ ID NO: 9450 - protein, 15 aa, Artificial Sequence
  Cyclic GFR-binding peptide
TPVGMDDYYLVSTAS

SEQ ID NO: 9451 - protein, 18 aa, Artificial Sequence
  Cyclic GFR-binding peptide
VVNKNEDKYLISIPSMKE

SEQ ID NO: 9452 - protein, 16 aa, Artificial Sequence
  Cyclic GFR-binding peptide
  MOD_RES (14)..(15): Xaa is C or S
FYLVSIANLKTPVXXA

SEQ ID NO: 9453 - protein, 13 aa, Artificial Sequence
  Cyclic GFR-binding peptide
KYLMSIPSTKVPA

SEQ ID NO: 9454 - protein, 16 aa, Artificial Sequence
  Cyclic GFR-binding peptide
  MOD_RES (14)..(15): Xaa is C or S
KYLISIPSLDQSVXXP

SEQ ID NO: 9455 - protein, 14 aa, Artificial Sequence
  Cyclic GFR-binding peptide
  MOD_RES (14)..(14): Xaa is C or S
LYLVSIPELKTPAX

SEQ ID NO: 9456 - protein, 18 aa, Artificial Sequence
  Cyclic GFR-binding peptide
  MOD_RES (14)..(15): Xaa is C or S
FYLMSIANTKVPAXXTSP

SEQ ID NO: 9457 - protein, 16 aa, Artificial Sequence
  Cyclic GFR-binding peptide
  MOD_RES (14)..(15): Xaa is C or S
FYLVSIANLQTPAXXP

SEQ ID NO: 9458 - protein, 17 aa, Artificial Sequence
  Cyclic GFR-binding peptide
  MOD_RES (14)..(15): Xaa is C or S
FYLMNIPSTKVPAXXTS

SEQ ID NO: 9459 - protein, 20 aa, Artificial Sequence
  Cyclic GFR-binding peptide
  MOD_RES (14)..(15): Xaa is C or S
FYLINIPSLAQPVXXPAASA

SEQ ID NO: 9460 - protein, 18 aa, Artificial Sequence
  Cyclic GFR-binding peptide
  MOD_RES (14)..(15): Xaa is C or S
KYLISIPSLKTPVXXAKS

SEQ ID NO: 9461 - protein, 16 aa, Artificial Sequence
  Cyclic GFR-binding peptide
  MOD_RES (14)..(15): Xaa is C or S
FYLVNIPSLQTPAXXP

SEQ ID NO: 9462 - protein, 18 aa, Artificial Sequence
  Cyclic GFR-binding peptide
  MOD_RES (14)..(15): Xaa is C or S
FYLISIANLDQSVXXPSA

SEQ ID NO: 9463 - protein, 18 aa, Artificial Sequence
  Cyclic GFR-binding peptide
  MOD_RES (14)..(15): Xaa is C or S
FYLVNIPSLKTPAXXAKP

SEQ ID NO: 9464 - protein, 20 aa, Artificial Sequence
  Cyclic GFR-binding peptide
  MOD_RES (14)..(15): Xaa is C or S
YYLVSTASLKTPAXXPKPVY

SEQ ID NO: 9465 - protein, 19 aa, Artificial Sequence
  Cyclic GFR-binding peptide
  MOD_RES (14)..(15): Xaa is C or S
FYLINIPSLRAPVXXSAPA

SEQ ID NO: 9466 - protein, 14 aa, Artificial Sequence
  Cyclic GFR-binding peptide
  MOD_RES (14)..(14): Xaa is C or S
KYLISIPSLRAPVX

SEQ ID NO: 9467 - protein, 18 aa, Artificial Sequence
  Cyclic GFR-binding peptide
  MOD_RES (14)..(14): Xaa is C or S
FYLVSIANLKTPAXTPKT

SEQ ID NO: 9468 - protein, 19 aa, Artificial Sequence
  Cyclic GFR-binding peptide
VVNNASDLYLISIPELRTP

SEQ ID NO: 9469 - protein, 20 aa, Artificial Sequence
  Cyclic GFR-binding peptide
  MOD_RES (14)..(15): Xaa is C or S
LYLMSIPELETPVXXAKPIK

SEQ ID NO: 9470 - protein, 14 aa, Artificial Sequence
  Cyclic GFR-binding peptide
  MOD_RES (14)..(14): Xaa is C or S
FYLMSIANMKTPTX

SEQ ID NO: 9471 - protein, 16 aa, Artificial Sequence
  Cyclic GFR-binding peptide
  MOD_RES (14)..(15): Xaa is C or S
LYLVSIPELKTPVXXA

SEQ ID NO: 9472 - protein, 19 aa, Artificial Sequence
  Cyclic GFR-binding peptide
VVKENEDKYLMSIPSLETP

SEQ ID NO: 9473 - protein, 17 aa, Artificial Sequence
  Cyclic GFR-binding peptide
TPVGMDDFYLVSIANLK

SEQ ID NO: 9474 - protein, 18 aa, Artificial Sequence
  Cyclic GFR-binding peptide
  MOD_RES (14)..(15): Xaa is C or S
LYLVSIPELQTPAXXPKP

SEQ ID NO: 9475 - protein, 17 aa, Artificial Sequence
  Cyclic GFR-binding peptide
  MOD_RES (14)..(15): Xaa is C or S
FYLISIANLKTPVXXAK

SEQ ID NO: 9476 - protein, 17 aa, Artificial Sequence
  Cyclic GFR-binding peptide
IVNSSDDFYLVNIPSLQ

SEQ ID NO: 9477 - protein, 17 aa, Artificial Sequence
  Cyclic GFR-binding peptide
  MOD_RES (14)..(15): Xaa is C or S
FYLVNIPSLKTPAXXPK

SEQ ID NO: 9478 - protein, 17 aa, Artificial Sequence
  Cyclic GFR-binding peptide
  MOD_RES (14)..(15): Xaa is C or S
KYLISIPSLRTPVXXTP

SEQ ID NO: 9479 - protein, 27 aa, Artificial Sequence
  Cyclic GFR-binding peptide
  MOD_RES (21)..(22): Xaa is C or S
LLVRGNDFYLMNIPSTKVPAXXTSPVR

SEQ ID NO: 9480 - protein, 27 aa, Artificial Sequence
  Cyclic GFR-binding peptide
  MOD_RES (21)..(22): Xaa is C or S
IVNSSDDKYLVSIPSLKTPAXXPKPVY

SEQ ID NO: 9481 - protein, 19 aa, Artificial Sequence
  Cyclic GFR-binding peptide
  MOD_RES (14)..(15): Xaa is C or S
FYLVNIPSLKTPVXXAKGV

SEQ ID NO: 9482 - protein, 20 aa, Artificial Sequence
  Cyclic GFR-binding peptide
  MOD_RES (14)..(15): Xaa is C or S
KYLISIPSLRAPVXXSAPAA

SEQ ID NO: 9483 - protein, 18 aa, Artificial Sequence
  Cyclic GFR-binding peptide
IVNNSSDKYLVSIPSLKT

SEQ ID NO: 9484 - protein, 18 aa, Artificial Sequence
  Cyclic GFR-binding peptide
IKPTKGIYYLISTASLDQ

SEQ ID NO: 9485 - protein, 19 aa, Artificial Sequence
  Cyclic GFR-binding peptide
  MOD_RES (14)..(15): Xaa is C or S
KYLMSIPSMKTPTXXPGAS

SEQ ID NO: 9486 - protein, 16 aa, Artificial Sequence
  Cyclic GFR-binding peptide
VVNNAADFYLISIANL

SEQ ID NO: 9487 - protein, 27 aa, Artificial Sequence
  Cyclic GFR-binding peptide
  MOD_RES (21)..(21): Xaa is C or S
IVNSSDDFYLVSIANLKTPAXTPKTVH

SEQ ID NO: 9488 - protein, 16 aa, Artificial Sequence
  Cyclic GFR-binding peptide
  MOD_RES (14)..(15): Xaa is C or S
LYLISIPELRAPVXXS

SEQ ID NO: 9489 - protein, 15 aa, Artificial Sequence
  Cyclic GFR-binding peptide
VVNNASDFYLINIPS

SEQ ID NO: 9490 - protein, 20 aa, Artificial Sequence
  Cyclic GFR-binding peptide
  MOD_RES (14)..(14): Xaa is C or S
FYLVNIPSLKTPAXTPKTVH

SEQ ID NO: 9491 - protein, 19 aa, Artificial Sequence
  Cyclic GFR-binding peptide
  MOD_RES (14)..(15): Xaa is C or S
YYLMSTASLETPVXXAKPI

SEQ ID NO: 9492 - protein, 19 aa, Artificial Sequence
  Cyclic GFR-binding peptide
  MOD_RES (14)..(14): Xaa is C or S
LYLVSIPELKTPAXTPKTV

SEQ ID NO: 9493 - protein, 18 aa, Artificial Sequence
  Cyclic GFR-binding peptide
  MOD_RES (14)..(15): Xaa is C or S
FYLVSIANLKTPAXXPKP

SEQ ID NO: 9494 - protein, 19 aa, Artificial Sequence
  Cyclic GFR-binding peptide
VVKDYEDYYLMSTASLETP

SEQ ID NO: 9495 - protein, 27 aa, Artificial Sequence
  Cyclic GFR-binding peptide
  MOD_RES (21)..(22): Xaa is C or S
IKPTKGIFYLISIANLDQSVXXPSASA

SEQ ID NO: 9496 - protein, 16 aa, Artificial Sequence
  Cyclic GFR-binding peptide
IIQQKDNFYLMNIPSM

SEQ ID NO: 9497 - protein, 15 aa, Artificial Sequence
  Cyclic GFR-binding peptide
VVKENEDYYLMSTAS

SEQ ID NO: 9498 - protein, 13 aa, Artificial Sequence
  Cyclic GFR-binding peptide
FYLVSIANLKTPA

SEQ ID NO: 9499 - protein, 17 aa, Artificial Sequence
  Cyclic GFR-binding peptide
  MOD_RES (14)..(15): Xaa is C or S
KYLISIPSLDQSVXXPS

SEQ ID NO: 9500 - protein, 16 aa, Artificial Sequence
  Cyclic GFR-binding peptide
  MOD_RES (14)..(15): Xaa is C or S
LYLISIPEMKEPVXXP

SEQ ID NO: 9501 - protein, 27 aa, Artificial Sequence
  Cyclic GFR-binding peptide
  MOD_RES (21)..(22): Xaa is C or S
VVNNASDFYLISIANLRTPVXXTPPTS

SEQ ID NO: 9502 - protein, 19 aa, Artificial Sequence
  Cyclic GFR-binding peptide
YTVVGKDLYLISIPELKTP

SEQ ID NO: 9503 - protein, 17 aa, Artificial Sequence
  Cyclic GFR-binding peptide
IVNNSSDFYLVSIANLK

SEQ ID NO: 9504 - protein, 14 aa, Artificial Sequence
  Cyclic GFR-binding peptide
  MOD_RES (14)..(14): Xaa is C or S
FYLISIANLAQPVX

SEQ ID NO: 9505 - protein, 19 aa, Artificial Sequence
  Cyclic GFR-binding peptide
  MOD_RES (14)..(15): Xaa is C or S
FYLINIPSMKEPVXXPEPI

SEQ ID NO: 9506 - protein, 17 aa, Artificial Sequence
  Cyclic GFR-binding peptide
LLVRGNDFYLMSIANTK

SEQ ID NO: 9507 - protein, 27 aa, Artificial Sequence
  Cyclic GFR-binding peptide
  MOD_RES (21)..(22): Xaa is C or S
VKPTRGVFYLISIANLDQPVXXPSASA

SEQ ID NO: 9508 - protein, 15 aa, Artificial Sequence
  Cyclic GFR-binding peptide
  MOD_RES (14)..(15): Xaa is C or S
YYLMSTASMKTPTXX

SEQ ID NO: 9509 - protein, 19 aa, Artificial Sequence
  Cyclic GFR-binding peptide
IIQQKDNFYLMSIANMKTP

SEQ ID NO: 9510 - protein, 20 aa, Artificial Sequence
  Cyclic GFR-binding peptide
  MOD_RES (14)..(15): Xaa is C or S
LYLMSIPEMKTPTXXPGASG

SEQ ID NO: 9511 - protein, 17 aa, Artificial Sequence
  Cyclic GFR-binding peptide
IVNSSDDFYLVNIPSLK

SEQ ID NO: 9512 - protein, 17 aa, Artificial Sequence
  Cyclic GFR-binding peptide
VVNNASDYYLISTASLR

SEQ ID NO: 9513 - protein, 16 aa, Artificial Sequence
  Cyclic GFR-binding peptide
VVNNAADKYLISIPSL

SEQ ID NO: 9514 - protein, 17 aa, Artificial Sequence
  Cyclic GFR-binding peptide
IKPTKGIFYLISIANLD

SEQ ID NO: 9515 - protein, 27 aa, Artificial Sequence
  Cyclic GFR-binding peptide
  MOD_RES (21)..(22): Xaa is C or S
TPVGMDDFYLVNIPSLKTPVXXAKGVK

SEQ ID NO: 9516 - protein, 20 aa, Artificial Sequence
  Cyclic GFR-binding peptide
  MOD_RES (14)..(15): Xaa is C or S
FYLISIANLRAPVXXSAPAA

SEQ ID NO: 9517 - protein, 13 aa, Artificial Sequence
  Cyclic GFR-binding peptide
FYLINIPSLRTPV

SEQ ID NO: 9518 - protein, 18 aa, Artificial Sequence
  Cyclic GFR-binding peptide
  MOD_RES (14)..(15): Xaa is C or S
LYLISIPELDQSVXXPSA

SEQ ID NO: 9519 - protein, 19 aa, Artificial Sequence
  Cyclic GFR-binding peptide
IVNNSSDLYLVSIPELKTP

SEQ ID NO: 9520 - protein, 19 aa, Artificial Sequence
  Cyclic GFR-binding peptide
  MOD_RES (14)..(15): Xaa is C or S
KYLMSIPSLETPVXXAKPI

SEQ ID NO: 9521 - protein, 16 aa, Artificial Sequence
  Cyclic GFR-binding peptide
IKPTKGIKYLISIPSL

SEQ ID NO: 9522 - protein, 27 aa, Artificial Sequence
  Cyclic GFR-binding peptide
  MOD_RES (21)..(22): Xaa is C or S
VVKDYEDYYLMSTASLETPVXXAKPIS

SEQ ID NO: 9523 - protein, 18 aa, Artificial Sequence
  Cyclic GFR-binding peptide
LLVRGNDLYLMSIPETKV

SEQ ID NO: 9524 - protein, 27 aa, Artificial Sequence
  Cyclic GFR-binding peptide
  MOD_RES (21)..(22): Xaa is C or S
IKPTKGILYLISIPELDQSVXXPSASA

SEQ ID NO: 9525 - protein, 17 aa, Artificial Sequence
  Cyclic GFR-binding peptide
  MOD_RES (14)..(15): Xaa is C or S
KYLISIPSLRAPVXXSA

SEQ ID NO: 9526 - protein, 20 aa, Artificial Sequence
  Cyclic GFR-binding peptide
  MOD_RES (14)..(14): Xaa is C or S
FYLVSIANLKTPAXTPKTVH

SEQ ID NO: 9527 - protein, 15 aa, Artificial Sequence
  Cyclic GFR-binding peptide
  MOD_RES (14)..(15): Xaa is C or S
FYLINIPSLAQPVXX

SEQ ID NO: 9528 - protein, 17 aa, Artificial Sequence
  Cyclic GFR-binding peptide
  MOD_RES (14)..(15): Xaa is C or S
YYLISTASLDQPVXXPS

SEQ ID NO: 9529 - protein, 20 aa, Artificial Sequence
  Cyclic GFR-binding peptide
  MOD_RES (14)..(15): Xaa is C or S
FYLVNIPSLQTPAXXPKPVT

SEQ ID NO: 9530 - protein, 16 aa, Artificial Sequence
  Cyclic GFR-binding peptide
  MOD_RES (14)..(15): Xaa is C or S
KYLMSIPSLETPVXXA

SEQ ID NO: 9531 - protein, 16 aa, Artificial Sequence
  Cyclic GFR-binding peptide
TPVGMDDFYLVNIPSL

SEQ ID NO: 9532 - protein, 16 aa, Artificial Sequence
  Cyclic GFR-binding peptide
IVNNSSDYYLVSTASL

SEQ ID NO: 9533 - protein, 19 aa, Artificial Sequence
  Cyclic GFR-binding peptide
TPVGMDDFYLVSIANLKTP

SEQ ID NO: 9534 - protein, 18 aa, Artificial Sequence
  Cyclic GFR-binding peptide
  MOD_RES (14)..(15): Xaa is C or S
FYLINIPSLDQPVXXPSA

SEQ ID NO: 9535 - protein, 15 aa, Artificial Sequence
  Cyclic GFR-binding peptide
YTVVGKDKYLISIPS

SEQ ID NO: 9536 - protein, 19 aa, Artificial Sequence
  Cyclic GFR-binding peptide
IKPTKGILYLISIPELDQS

SEQ ID NO: 9537 - protein, 18 aa, Artificial Sequence
  Cyclic GFR-binding peptide
  MOD_RES (14)..(15): Xaa is C or S
YYLMSTASTKVPAXXTSP

SEQ ID NO: 9538 - protein, 16 aa, Artificial Sequence
  Cyclic GFR-binding peptide
  MOD_RES (14)..(15): Xaa is C or S
FYLVSIANLKTPAXXP

SEQ ID NO: 9539 - protein, 19 aa, Artificial Sequence
  Cyclic GFR-binding peptide
LLVRGNDKYLMSIPSTKVP

SEQ ID NO: 9540 - protein, 17 aa, Artificial Sequence
  Cyclic GFR-binding peptide
VKPKRGVYYLISTASLA

SEQ ID NO: 9541 - protein, 15 aa, Artificial Sequence
  Cyclic GFR-binding peptide
VKPKRGVLYLISIPE

SEQ ID NO: 9542 - protein, 27 aa, Artificial Sequence
  Cyclic GFR-binding peptide
  MOD_RES (21)..(22): Xaa is C or S
VKPKRGVFYLINIPSLAQPVXXPAASA

SEQ ID NO: 9543 - protein, 18 aa, Artificial Sequence
  Cyclic GFR-binding peptide
  MOD_RES (14)..(14): Xaa is C or S
YYLVSTASLKTPAXTPKT

SEQ ID NO: 9544 - protein, 13 aa, Artificial Sequence
  Cyclic GFR-binding peptide
KYLMSIPSLETPV

SEQ ID NO: 9545 - protein, 17 aa, Artificial Sequence
  Cyclic GFR-binding peptide
VVNKNEDKYLISIPSMK

SEQ ID NO: 9546 - protein, 16 aa, Artificial Sequence
  Cyclic GFR-binding peptide
VKPTRGVFYLISIANL

SEQ ID NO: 9547 - protein, 13 aa, Artificial Sequence
  Cyclic GFR-binding peptide
LYLISIPEMKEPV

SEQ ID NO: 9548 - protein, 18 aa, Artificial Sequence
  Cyclic GFR-binding peptide
VVNNAADYYLISTASLRA

SEQ ID NO: 9549 - protein, 13 aa, Artificial Sequence
  Cyclic GFR-binding peptide
FYLVSIANLKTPV

SEQ ID NO: 9550 - protein, 17 aa, Artificial Sequence
  Cyclic GFR-binding peptide
VVKDYEDFYLMSIANLE

SEQ ID NO: 9551 - protein, 14 aa, Artificial Sequence
  Cyclic GFR-binding peptide
  MOD_RES (14)..(14): Xaa is C or S
KYLISIPSLDQSVX

SEQ ID NO: 9552 - protein, 18 aa, Artificial Sequence
  Cyclic GFR-binding peptide
  MOD_RES (14)..(15): Xaa is C or S
YYLISTASLRAPVXXSAP

SEQ ID NO: 9553 - protein, 19 aa, Artificial Sequence
  Cyclic GFR-binding peptide
  MOD_RES (14)..(15): Xaa is C or S
FYLVSIANLKTPAXXAKPV

SEQ ID NO: 9554 - protein, 27 aa, Artificial Sequence
  Cyclic GFR-binding peptide
  MOD_RES (21)..(22): Xaa is C or S
IVNSSDDFYLVSIANLQTPAXXPKPVT

SEQ ID NO: 9555 - protein, 20 aa, Artificial Sequence
  Cyclic GFR-binding peptide
  MOD_RES (14)..(15): Xaa is C or S
YYLVSTASLKTPAXXPKPVH

SEQ ID NO: 9556 - protein, 15 aa, Artificial Sequence
  Cyclic GFR-binding peptide
IVNNSSDKYLVSIPS

SEQ ID NO: 9557 - protein, 15 aa, Artificial Sequence
  Cyclic GFR-binding peptide
LLVRGNDFYLMNIPS

SEQ ID NO: 9558 - protein, 15 aa, Artificial Sequence
  Cyclic GFR-binding peptide
VVKDYEDKYLMSIPS

SEQ ID NO: 9559 - protein, 16 aa, Artificial Sequence
  Cyclic GFR-binding peptide
YTVVGKDYYLISTASL

SEQ ID NO: 9560 - protein, 19 aa, Artificial Sequence
  Cyclic GFR-binding peptide
  MOD_RES (14)..(15): Xaa is C or S
FYLISIANLDQPVXXPSAS

SEQ ID NO: 9561 - protein, 18 aa, Artificial Sequence
  Cyclic GFR-binding peptide
TPVGMDDKYLVSIPSLKT

SEQ ID NO: 9562 - protein, 17 aa, Artificial Sequence
  Cyclic GFR-binding peptide
YTVVGKDFYLISIANLK

SEQ ID NO: 9563 - protein, 19 aa, Artificial Sequence
  Cyclic GFR-binding peptide
  MOD_RES (14)..(15): Xaa is C or S
KYLVSIPSLKTPAXXAKPV

SEQ ID NO: 9564 - protein, 18 aa, Artificial Sequence
  Cyclic GFR-binding peptide
VVNNASDLYLISIPELRT

SEQ ID NO: 9565 - protein, 16 aa, Artificial Sequence
  Cyclic GFR-binding peptide
  MOD_RES (14)..(15): Xaa is C or S
FYLMSIANLETPVXXA

SEQ ID NO: 9566 - protein, 17 aa, Artificial Sequence
  Cyclic GFR-binding peptide
  MOD_RES (14)..(15): Xaa is C or S
YYLISTASLAQPVXXPA

SEQ ID NO: 9567 - protein, 18 aa, Artificial Sequence
  Cyclic GFR-binding peptide
VVKENEDLYLMSIPELET

SEQ ID NO: 9568 - protein, 18 aa, Artificial Sequence
  Cyclic GFR-binding peptide
  MOD_RES (14)..(15): Xaa is C or S
FYLINIPSLRTPVXXTPP

SEQ ID NO: 9569 - protein, 18 aa, Artificial Sequence
  Cyclic GFR-binding peptide
  MOD_RES (14)..(15): Xaa is C or S
FYLINIPSLAQPVXXPAA

SEQ ID NO: 9570 - protein, 16 aa, Artificial Sequence
  Cyclic GFR-binding peptide
  MOD_RES (14)..(15): Xaa is C or S
KYLISIPSLKTPVXXA

SEQ ID NO: 9571 - protein, 16 aa, Artificial Sequence
  Cyclic GFR-binding peptide
  MOD_RES (14)..(15): Xaa is C or S
FYLVNIPSLKTPAXXA

SEQ ID NO: 9572 - protein, 15 aa, Artificial Sequence
  Cyclic GFR-binding peptide
  MOD_RES (14)..(15): Xaa is C or S
FYLINIPSMKEPVXX

SEQ ID NO: 9573 - protein, 19 aa, Artificial Sequence
  Cyclic GFR-binding peptide
TPVGMDDYYLVSTASLKTP

SEQ ID NO: 9574 - protein, 17 aa, Artificial Sequence
  Cyclic GFR-binding peptide
VVKDYEDKYLMSIPSLE

SEQ ID NO: 9575 - protein, 13 aa, Artificial Sequence
  Cyclic GFR-binding peptide
LYLISIPELAQPV

SEQ ID NO: 9576 - protein, 19 aa, Artificial Sequence
  Cyclic GFR-binding peptide
LLVRGNDFYLMSIANTKVP

SEQ ID NO: 9577 - protein, 13 aa, Artificial Sequence
  Cyclic GFR-binding peptide
FYLINIPSLRAPV

SEQ ID NO: 9578 - protein, 17 aa, Artificial Sequence
  Cyclic GFR-binding peptide
VVKENEDFYLMNIPSLE

SEQ ID NO: 9579 - protein, 15 aa, Artificial Sequence
  Cyclic GFR-binding peptide
  MOD_RES (14)..(15): Xaa is C or S
LYLISIPELRAPVXX

SEQ ID NO: 9580 - protein, 16 aa, Artificial Sequence
  Cyclic GFR-binding peptide
  MOD_RES (14)..(15): Xaa is C or S
YYLISTASLKTPVXXA

SEQ ID NO: 9581 - protein, 19 aa, Artificial Sequence
  Cyclic GFR-binding peptide
  MOD_RES (14)..(15): Xaa is C or S
YYLMSTASMKTPTXXPGAS

SEQ ID NO: 9582 - protein, 16 aa, Artificial Sequence
  Cyclic GFR-binding peptide
  MOD_RES (14)..(14): Xaa is C or S
FYLVSIANLKTPAXTP

SEQ ID NO: 9583 - protein, 18 aa, Artificial Sequence
  Cyclic GFR-binding peptide
  MOD_RES (14)..(15): Xaa is C or S
LYLVSIPELKTPAXXAKP

SEQ ID NO: 9584 - protein, 18 aa, Artificial Sequence
  Cyclic GFR-binding peptide
IIQQKDNLYLMSIPEMKT

SEQ ID NO: 9585 - protein, 19 aa, Artificial Sequence
  Cyclic GFR-binding peptide
  MOD_RES (14)..(15): Xaa is C or S
KYLISIPSLKTPVXXAKSA

SEQ ID NO: 9586 - protein, 17 aa, Artificial Sequence
  Cyclic GFR-binding peptide
IKPTKGIKYLISIPSLD

SEQ ID NO: 9587 - protein, 17 aa, Artificial Sequence
  Cyclic GFR-binding peptide
  MOD_RES (14)..(15): Xaa is C or S
YYLVSTASLKTPAXXPK

SEQ ID NO: 9588 - protein, 17 aa, Artificial Sequence
  Cyclic GFR-binding peptide
LLVRGNDKYLMSIPSTK

SEQ ID NO: 9589 - protein, 15 aa, Artificial Sequence
  Cyclic GFR-binding peptide
IVNSSDDYYLVSTAS

SEQ ID NO: 9590 - protein, 18 aa, Artificial Sequence
  Cyclic GFR-binding peptide
  MOD_RES (14)..(15): Xaa is C or S
FYLVNIPSLKTPVXXAKG

SEQ ID NO: 9591 - protein, 19 aa, Artificial Sequence
  Cyclic GFR-binding peptide
  MOD_RES (14)..(15): Xaa is C or S
FYLMNIPSTKVPAXXTSPV

SEQ ID NO: 9592 - protein, 15 aa, Artificial Sequence
  Cyclic GFR-binding peptide
  MOD_RES (14)..(15): Xaa is C or S
FYLVNIPSLQTPAXX

SEQ ID NO: 9593 - protein, 13 aa, Artificial Sequence
  Cyclic GFR-binding peptide
FYLMSIANMKTPT

SEQ ID NO: 9594 - protein, 20 aa, Artificial Sequence
  Cyclic GFR-binding peptide
  MOD_RES (14)..(15): Xaa is C or S
FYLMSIANTKVPAXXTSPVR

SEQ ID NO: 9595 - protein, 17 aa, Artificial Sequence
  Cyclic GFR-binding peptide
VVNNAADYYLISTASLR

SEQ ID NO: 9596 - protein, 16 aa, Artificial Sequence
  Cyclic GFR-binding peptide
  MOD_RES (14)..(15): Xaa is C or S
KYLVSIPSLKTPAXXA

SEQ ID NO: 9597 - protein, 18 aa, Artificial Sequence
  Cyclic GFR-binding peptide
IVNNSSDFYLVNIPSLKT

SEQ ID NO: 9598 - protein, 20 aa, Artificial Sequence
  Cyclic GFR-binding peptide
  MOD_RES (14)..(15): Xaa is C or S
KYLISIPSMKEPVXXPEPIG

SEQ ID NO: 9599 - protein, 19 aa, Artificial Sequence
  Cyclic GFR-binding peptide
VKPKRGVFYLISIANLAQP

SEQ ID NO: 9600 - protein, 27 aa, Artificial Sequence
  Cyclic GFR-binding peptide
  MOD_RES (21)..(22): Xaa is C or S
VVNNASDKYLISIPSLRTPVXXTPPTS

SEQ ID NO: 9601 - protein, 14 aa, Artificial Sequence
  Cyclic GFR-binding peptide
  MOD_RES (14)..(14): Xaa is C or S
FYLISIANLRTPVX

SEQ ID NO: 9602 - protein, 17 aa, Artificial Sequence
  Cyclic GFR-binding peptide
  MOD_RES (14)..(14): Xaa is C or S
FYLVSIANLKTPAXTPK

SEQ ID NO: 9603 - protein, 19 aa, Artificial Sequence
  Cyclic GFR-binding peptide
IIQQKDNKYLMSIPSMKTP

SEQ ID NO: 9604 - protein, 14 aa, Artificial Sequence
  Cyclic GFR-binding peptide
  MOD_RES (14)..(14): Xaa is C or S
FYLMNIPSTKVPAX

SEQ ID NO: 9605 - protein, 15 aa, Artificial Sequence
  Cyclic GFR-binding peptide
  MOD_RES (14)..(15): Xaa is C or S
FYLINIPSLDQSVXX

SEQ ID NO: 9606 - protein, 18 aa, Artificial Sequence
  Cyclic GFR-binding peptide
VKPTRGVLYLISIPELDQ

SEQ ID NO: 9607 - protein, 15 aa, Artificial Sequence
  Cyclic GFR-binding peptide
  MOD_RES (14)..(15): Xaa is C or S
YYLISTASLDQPVXX

SEQ ID NO: 9608 - protein, 15 aa, Artificial Sequence
  Cyclic GFR-binding peptide
VVKDYEDFYLMSIAN

SEQ ID NO: 9609 - protein, 27 aa, Artificial Sequence
  Cyclic GFR-binding peptide
  MOD_RES (21)..(22): Xaa is C or S
IVNNSSDLYLVSIPELKTPAXXAKPVA

SEQ ID NO: 9610 - protein, 20 aa, Artificial Sequence
  Cyclic GFR-binding peptide
  MOD_RES (14)..(15): Xaa is C or S
YYLVSTASLKTPVXXAKGVK

SEQ ID NO: 9611 - protein, 19 aa, Artificial Sequence
  Cyclic GFR-binding peptide
VVNNASDKYLISIPSLRTP

SEQ ID NO: 9612 - protein, 16 aa, Artificial Sequence
  Cyclic GFR-binding peptide
IVNSSDDKYLVSIPSL

SEQ ID NO: 9613 - protein, 16 aa, Artificial Sequence
  Cyclic GFR-binding peptide
  MOD_RES (14)..(15): Xaa is C or S
FYLINIPSLAQPVXXP

SEQ ID NO: 9614 - protein, 17 aa, Artificial Sequence
  Cyclic GFR-binding peptide
IIQQKDNYYLMSTASMK

SEQ ID NO: 9615 - protein, 16 aa, Artificial Sequence
  Cyclic GFR-binding peptide
VKPKRGVKYLISIPSL

SEQ ID NO: 9616 - protein, 13 aa, Artificial Sequence
  Cyclic GFR-binding peptide
FYLISIANLDQSV

SEQ ID NO: 9617 - protein, 18 aa, Artificial Sequence
  Cyclic GFR-binding peptide
YTVVGKDFYLINIPSLKT

SEQ ID NO: 9618 - protein, 16 aa, Artificial Sequence
  Cyclic GFR-binding peptide
  MOD_RES (14)..(15): Xaa is C or S
KYLISIPSLDQPVXXP

SEQ ID NO: 9619 - protein, 15 aa, Artificial Sequence
  Cyclic GFR-binding peptide
  MOD_RES (14)..(15): Xaa is C or S
KYLISIPSLDQSVXX

SEQ ID NO: 9620 - protein, 27 aa, Artificial Sequence
  Cyclic GFR-binding peptide
  MOD_RES (21)..(22): Xaa is C or S
IVNSSDDKYLVSIPSLQTPAXXPKPVT

SEQ ID NO: 9621 - protein, 18 aa, Artificial Sequence
  Cyclic GFR-binding peptide
  MOD_RES (14)..(15): Xaa is C or S
KYLISIPSLRAPVXXSAP

SEQ ID NO: 9622 - protein, 19 aa, Artificial Sequence
  Cyclic GFR-binding peptide
  MOD_RES (14)..(15): Xaa is C or S
FYLINIPSLRTPVXXTPPT

SEQ ID NO: 9623 - protein, 17 aa, Artificial Sequence
  Cyclic GFR-binding peptide
  MOD_RES (14)..(14): Xaa is C or S
KYLVSIPSLKTPAXTPK

SEQ ID NO: 9624 - protein, 15 aa, Artificial Sequence
  Cyclic GFR-binding peptide
IKPTKGILYLISIPE

SEQ ID NO: 9625 - protein, 14 aa, Artificial Sequence
  Cyclic GFR-binding peptide
  MOD_RES (14)..(14): Xaa is C or S
YYLISTASLDQSVX

SEQ ID NO: 9626 - protein, 19 aa, Artificial Sequence
  Cyclic GFR-binding peptide
  MOD_RES (14)..(15): Xaa is C or S
FYLINIPSLKTPVXXAKSA

SEQ ID NO: 9627 - protein, 13 aa, Artificial Sequence
  Cyclic GFR-binding peptide
YYLMSTASLETPV

SEQ ID NO: 9628 - protein, 18 aa, Artificial Sequence
  Cyclic GFR-binding peptide
YTVVGKDYYLISTASLKT

SEQ ID NO: 9629 - protein, 20 aa, Artificial Sequence
  Cyclic GFR-binding peptide
  MOD_RES (14)..(15): Xaa is C or S
LYLVSIPELKTPAXXAKPVA

SEQ ID NO: 9630 - protein, 16 aa, Artificial Sequence
  Cyclic GFR-binding peptide
VKPTRGVKYLISIPSL

SEQ ID NO: 9631 - protein, 15 aa, Artificial Sequence
  Cyclic GFR-binding peptide
  MOD_RES (14)..(15): Xaa is C or S
KYLISIPSLAQPVXX

SEQ ID NO: 9632 - protein, 18 aa, Artificial Sequence
  Cyclic GFR-binding peptide
  MOD_RES (14)..(15): Xaa is C or S
KYLMSIPSTKVPAXXTSP

SEQ ID NO: 9633 - protein, 19 aa, Artificial Sequence
  Cyclic GFR-binding peptide
VKPKRGVYYLISTASLAQP

SEQ ID NO: 9634 - protein, 14 aa, Artificial Sequence
  Cyclic GFR-binding peptide
  MOD_RES (14)..(14): Xaa is C or S
FYLINIPSLKTPVX

SEQ ID NO: 9635 - protein, 18 aa, Artificial Sequence
  Cyclic GFR-binding peptide
IVNNSSDYYLVSTASLKT

SEQ ID NO: 9636 - protein, 15 aa, Artificial Sequence
  Cyclic GFR-binding peptide
  MOD_RES (14)..(15): Xaa is C or S
FYLMNIPSTKVPAXX

SEQ ID NO: 9637 - protein, 17 aa, Artificial Sequence
  Cyclic GFR-binding peptide
IVNSSDDYYLVSTASLQ

SEQ ID NO: 9638 - protein, 14 aa, Artificial Sequence
  Cyclic GFR-binding peptide
  MOD_RES (14)..(14): Xaa is C or S
FYLVNIPSLQTPAX

SEQ ID NO: 9639 - protein, 16 aa, Artificial Sequence
  Cyclic GFR-binding peptide
  MOD_RES (14)..(15): Xaa is C or S
YYLMSTASLETPVXXA

SEQ ID NO: 9640 - protein, 27 aa, Artificial Sequence
  Cyclic GFR-binding peptide
  MOD_RES (21)..(22): Xaa is C or S
YTVVGKDFYLINIPSLKTPVXXAKSAK

SEQ ID NO: 9641 - protein, 19 aa, Artificial Sequence
  Cyclic GFR-binding peptide
  MOD_RES (14)..(15): Xaa is C or S
FYLISIANLDQSVXXPSAS

SEQ ID NO: 9642 - protein, 19 aa, Artificial Sequence
  Cyclic GFR-binding peptide
  MOD_RES (14)..(15): Xaa is C or S
FYLMNIPSLETPVXXAKPI

SEQ ID NO: 9643 - protein, 27 aa, Artificial Sequence
  Cyclic GFR-binding peptide
  MOD_RES (21)..(22): Xaa is C or S
LLVRGNDYYLMSTASTKVPAXXTSPVR

SEQ ID NO: 9644 - protein, 17 aa, Artificial Sequence
  Cyclic GFR-binding peptide
  MOD_RES (14)..(14): Xaa is C or S
YYLVSTASLKTPAXTPK

SEQ ID NO: 9645 - protein, 19 aa, Artificial Sequence
  Cyclic GFR-binding peptide
VVNKNEDFYLISIANMKEP

SEQ ID NO: 9646 - protein, 17 aa, Artificial Sequence
  Cyclic GFR-binding peptide
IVNSSDDYYLVSTASLK

SEQ ID NO: 9647 - protein, 18 aa, Artificial Sequence
  Cyclic GFR-binding peptide
VKPKRGVFYLISIANLAQ

SEQ ID NO: 9648 - protein, 16 aa, Artificial Sequence
  Cyclic GFR-binding peptide
IKPTKGIFYLISIANL

SEQ ID NO: 9649 - protein, 18 aa, Artificial Sequence
  Cyclic GFR-binding peptide
  MOD_RES (14)..(15): Xaa is C or S
KYLISIPSLAQPVXXPAA

SEQ ID NO: 9650 - protein, 18 aa, Artificial Sequence
  Cyclic GFR-binding peptide
IVNSSDDLYLVSIPELKT

SEQ ID NO: 9651 - protein, 14 aa, Artificial Sequence
  Cyclic GFR-binding peptide
  MOD_RES (14)..(14): Xaa is C or S
LYLISIPELRAPVX

SEQ ID NO: 9652 - protein, 18 aa, Artificial Sequence
  Cyclic GFR-binding peptide
VKPKRGVFYLINIPSLAQ

SEQ ID NO: 9653 - protein, 20 aa, Artificial Sequence
  Cyclic GFR-binding peptide
  MOD_RES (14)..(15): Xaa is C or S
LYLMSIPETKVPAXXTSPVR

SEQ ID NO: 9654 - protein, 13 aa, Artificial Sequence
  Cyclic GFR-binding peptide
YYLVSTASLKTPV

SEQ ID NO: 9655 - protein, 18 aa, Artificial Sequence
  Cyclic GFR-binding peptide
IVNSSDDLYLVSIPELQT

SEQ ID NO: 9656 - protein, 20 aa, Artificial Sequence
  Cyclic GFR-binding peptide
  MOD_RES (14)..(15): Xaa is C or S
FYLMNIPSLETPVXXAKPIS

SEQ ID NO: 9657 - protein, 17 aa, Artificial Sequence
  Cyclic GFR-binding peptide
  MOD_RES (14)..(15): Xaa is C or S
FYLINIPSLRTPVXXTP

SEQ ID NO: 9658 - protein, 16 aa, Artificial Sequence
  Cyclic GFR-binding peptide
VVNKNEDLYLISIPEM

SEQ ID NO: 9659 - protein, 16 aa, Artificial Sequence
  Cyclic GFR-binding peptide
IKPTKGIFYLINIPSL

SEQ ID NO: 9660 - protein, 14 aa, Artificial Sequence
  Cyclic GFR-binding peptide
  MOD_RES (14)..(14): Xaa is C or S
YYLMSTASMKTPTX

SEQ ID NO: 9661 - protein, 18 aa, Artificial Sequence
  Cyclic GFR-binding peptide
  MOD_RES (14)..(15): Xaa is C or S
FYLMNIPSLETPVXXAKP

SEQ ID NO: 9662 - protein, 20 aa, Artificial Sequence
  Cyclic GFR-binding peptide
  MOD_RES (14)..(15): Xaa is C or S
FYLVSIANLKTPVXXAKGVK

SEQ ID NO: 9663 - protein, 18 aa, Artificial Sequence
  Cyclic GFR-binding peptide
  MOD_RES (14)..(15): Xaa is C or S
KYLVSIPSLQTPAXXPKP

SEQ ID NO: 9664 - protein, 18 aa, Artificial Sequence
  Cyclic GFR-binding peptide
VVKDYEDYYLMSTASLET

SEQ ID NO: 9665 - protein, 13 aa, Artificial Sequence
  Cyclic GFR-binding peptide
KYLVSIPSLQTPA

SEQ ID NO: 9666 - protein, 27 aa, Artificial Sequence
  Cyclic GFR-binding peptide
  MOD_RES (21)..(22): Xaa is C or S
VKPTRGVKYLISIPSLDQPVXXPSASA

SEQ ID NO: 9667 - protein, 16 aa, Artificial Sequence
  Cyclic GFR-binding peptide
  MOD_RES (14)..(15): Xaa is C or S
YYLMSTASTKVPAXXT

SEQ ID NO: 9668 - protein, 15 aa, Artificial Sequence
  Cyclic GFR-binding peptide
VVKENEDFYLMNIPS

SEQ ID NO: 9669 - protein, 15 aa, Artificial Sequence
  Cyclic GFR-binding peptide
  MOD_RES (14)..(15): Xaa is C or S
KYLMSIPSMKTPTXX

SEQ ID NO: 9670 - protein, 13 aa, Artificial Sequence
  Cyclic GFR-binding peptide
KYLISIPSLKTPV

SEQ ID NO: 9671 - protein, 27 aa, Artificial Sequence
  Cyclic GFR-binding peptide
  MOD_RES (21)..(22): Xaa is C or S
YTVVGKDFYLISIANLKTPVXXAKSAK

SEQ ID NO: 9672 - protein, 14 aa, Artificial Sequence
  Cyclic GFR-binding peptide
  MOD_RES (14)..(14): Xaa is C or S
YYLISTASLAQPVX

SEQ ID NO: 9673 - protein, 13 aa, Artificial Sequence
  Cyclic GFR-binding peptide
YYLVSTASLKTPA

SEQ ID NO: 9674 - protein, 15 aa, Artificial Sequence
  Cyclic GFR-binding peptide
VVNNASDYYLISTAS

SEQ ID NO: 9675 - protein, 18 aa, Artificial Sequence
  Cyclic GFR-binding peptide
TPVGMDDFYLVNIPSLKT

SEQ ID NO: 9676 - protein, 16 aa, Artificial Sequence
  Cyclic GFR-binding peptide
IIQQKDNKYLMSIPSM

SEQ ID NO: 9677 - protein, 16 aa, Artificial Sequence
  Cyclic GFR-binding peptide
  MOD_RES (14)..(15): Xaa is C or S
FYLINIPSLDQSVXXP

SEQ ID NO: 9678 - protein, 20 aa, Artificial Sequence
  Cyclic GFR-binding peptide
  MOD_RES (14)..(15): Xaa is C or S
YYLISTASLAQPVXXPAASA

SEQ ID NO: 9679 - protein, 17 aa, Artificial Sequence
  Cyclic GFR-binding peptide
  MOD_RES (14)..(15): Xaa is C or S
YYLMSTASTKVPAXXTS

SEQ ID NO: 9680 - protein, 27 aa, Artificial Sequence
  Cyclic GFR-binding peptide
  MOD_RES (21)..(22): Xaa is C or S
IVNSSDDYYLVSTASLKTPAXXPKPVH

SEQ ID NO: 9681 - protein, 18 aa, Artificial Sequence
  Cyclic GFR-binding peptide
  MOD_RES (14)..(15): Xaa is C or S
YYLVSTASLKTPAXXPKP

SEQ ID NO: 9682 - protein, 13 aa, Artificial Sequence
  Cyclic GFR-binding peptide
LYLISIPELDQSV

SEQ ID NO: 9683 - protein, 14 aa, Artificial Sequence
  Cyclic GFR-binding peptide
  MOD_RES (14)..(14): Xaa is C or S
FYLMNIPSLETPVX

SEQ ID NO: 9684 - protein, 14 aa, Artificial Sequence
  Cyclic GFR-binding peptide
  MOD_RES (14)..(14): Xaa is C or S
KYLISIPSLDQPVX

SEQ ID NO: 9685 - protein, 19 aa, Artificial Sequence
  Cyclic GFR-binding peptide
  MOD_RES (14)..(15): Xaa is C or S
FYLVNIPSLQTPAXXPKPV

SEQ ID NO: 9686 - protein, 17 aa, Artificial Sequence
  Cyclic GFR-binding peptide
VVNKNEDFYLINIPSMK

SEQ ID NO: 9687 - protein, 16 aa, Artificial Sequence
  Cyclic GFR-binding peptide
VVNNASDKYLISIPSL

SEQ ID NO: 9688 - protein, 16 aa, Artificial Sequence
  Cyclic GFR-binding peptide
VVNNASDFYLINIPSL

SEQ ID NO: 9689 - protein, 13 aa, Artificial Sequence
  Cyclic GFR-binding peptide
YYLISTASMKEPV

SEQ ID NO: 9690 - protein, 19 aa, Artificial Sequence
  Cyclic GFR-binding peptide
  MOD_RES (14)..(15): Xaa is C or S
LYLMSIPEMKTPTXXPGAS

SEQ ID NO: 9691 - protein, 27 aa, Artificial Sequence
  Cyclic GFR-binding peptide
  MOD_RES (21)..(22): Xaa is C or S
VKPKRGVYYLISTASLAQPVXXPAASA

SEQ ID NO: 9692 - protein, 15 aa, Artificial Sequence
  Cyclic GFR-binding peptide
  MOD_RES (14)..(15): Xaa is C or S
KYLISIPSLDQPVXX

SEQ ID NO: 9693 - protein, 18 aa, Artificial Sequence
  Cyclic GFR-binding peptide
  MOD_RES (14)..(15): Xaa is C or S
FYLINIPSLKTPVXXAKS

SEQ ID NO: 9694 - protein, 13 aa, Artificial Sequence
  Cyclic GFR-binding peptide
FYLMSIANLETPV

SEQ ID NO: 9695 - protein, 19 aa, Artificial Sequence
  Cyclic GFR-binding peptide
  MOD_RES (14)..(15): Xaa is C or S
FYLMSIANMKTPTXXPGAS

SEQ ID NO: 9696 - protein, 20 aa, Artificial Sequence
  Cyclic GFR-binding peptide
  MOD_RES (14)..(15): Xaa is C or S
KYLISIPSLAQPVXXPAASA

SEQ ID NO: 9697 - protein, 18 aa, Artificial Sequence
  Cyclic GFR-binding peptide
  MOD_RES (14)..(15): Xaa is C or S
YYLVSTASLQTPAXXPKP

SEQ ID NO: 9698 - protein, 16 aa, Artificial Sequence
  Cyclic GFR-binding peptide
VVKDYEDLYLMSIPEL

SEQ ID NO: 9699 - protein, 17 aa, Artificial Sequence
  Cyclic GFR-binding peptide
  MOD_RES (14)..(15): Xaa is C or S
YYLVSTASLQTPAXXPK

SEQ ID NO: 9700 - protein, 15 aa, Artificial Sequence
  Cyclic GFR-binding peptide
VKPTRGVYYLISTAS

SEQ ID NO: 9701 - protein, 15 aa, Artificial Sequence
  Cyclic GFR-binding peptide
VVNKNEDKYLISIPS

SEQ ID NO: 9702 - protein, 17 aa, Artificial Sequence
  Cyclic GFR-binding peptide
VVKENEDYYLMSTASLE

SEQ ID NO: 9703 - protein, 15 aa, Artificial Sequence
  Cyclic GFR-binding peptide
  MOD_RES (14)..(15): Xaa is C or S
FYLVNIPSLKTPVXX

SEQ ID NO: 9704 - protein, 18 aa, Artificial Sequence
  Cyclic GFR-binding peptide
IKPTKGILYLISIPELDQ

SEQ ID NO: 9705 - protein, 15 aa, Artificial Sequence
  Cyclic GFR-binding peptide
  MOD_RES (14)..(15): Xaa is C or S
FYLISIANLRTPVXX

SEQ ID NO: 9706 - protein, 27 aa, Artificial Sequence
  Cyclic GFR-binding peptide
  MOD_RES (21)..(22): Xaa is C or S
VVNKNEDLYLISIPEMKEPVXXPEPIG

SEQ ID NO: 9707 - protein, 19 aa, Artificial Sequence
  Cyclic GFR-binding peptide
  MOD_RES (14)..(15): Xaa is C or S
LYLISIPELDQSVXXPSAS

SEQ ID NO: 9708 - protein, 16 aa, Artificial Sequence
  Cyclic GFR-binding peptide
  MOD_RES (14)..(15): Xaa is C or S
YYLVSTASLKTPVXXA

SEQ ID NO: 9709 - protein, 15 aa, Artificial Sequence
  Cyclic GFR-binding peptide
IVNSSDDFYLVNIPS

SEQ ID NO: 9710 - protein, 19 aa, Artificial Sequence
  Cyclic GFR-binding peptide
VVNKNEDKYLISIPSMKEP

SEQ ID NO: 9711 - protein, 17 aa, Artificial Sequence
  Cyclic GFR-binding peptide
  MOD_RES (14)..(15): Xaa is C or S
KYLVSIPSLKTPAXXPK

SEQ ID NO: 9712 - protein, 17 aa, Artificial Sequence
  Cyclic GFR-binding peptide
  MOD_RES (14)..(15): Xaa is C or S
KYLVSIPSLQTPAXXPK

SEQ ID NO: 9713 - protein, 17 aa, Artificial Sequence
  Cyclic GFR-binding peptide
VVNNAADFYLINIPSLR

SEQ ID NO: 9714 - protein, 16 aa, Artificial Sequence
  Cyclic GFR-binding peptide
TPVGMDDYYLVSTASL

SEQ ID NO: 9715 - protein, 16 aa, Artificial Sequence
  Cyclic GFR-binding peptide
VKPKRGVFYLISIANL

SEQ ID NO: 9716 - protein, 14 aa, Artificial Sequence
  Cyclic GFR-binding peptide
  MOD_RES (14)..(14): Xaa is C or S
YYLISTASLDQPVX

SEQ ID NO: 9717 - protein, 14 aa, Artificial Sequence
  Cyclic GFR-binding peptide
  MOD_RES (14)..(14): Xaa is C or S
KYLISIPSLAQPVX

SEQ ID NO: 9718 - protein, 14 aa, Artificial Sequence
  Cyclic GFR-binding peptide
  MOD_RES (14)..(14): Xaa is C or S
FYLISIANLRAPVX

SEQ ID NO: 9719 - protein, 18 aa, Artificial Sequence
  Cyclic GFR-binding peptide
VKPKRGVKYLISIPSLAQ

SEQ ID NO: 9720 - protein, 13 aa, Artificial Sequence
  Cyclic GFR-binding peptide
LYLMSIPETKVPA

SEQ ID NO: 9721 - protein, 27 aa, Artificial Sequence
  Cyclic GFR-binding peptide
  MOD_RES (21)..(22): Xaa is C or S
IIQQKDNLYLMSIPEMKTPTXXPGASG

SEQ ID NO: 9722 - protein, 27 aa, Artificial Sequence
  Cyclic GFR-binding peptide
  MOD_RES (21)..(22): Xaa is C or S
YTVVGKDKYLISIPSLKTPVXXAKSAK

SEQ ID NO: 9723 - protein, 17 aa, Artificial Sequence
  Cyclic GFR-binding peptide
  MOD_RES (14)..(15): Xaa is C or S
FYLINIPSLDQSVXXPS

SEQ ID NO: 9724 - protein, 16 aa, Artificial Sequence
  Cyclic GFR-binding peptide
  MOD_RES (14)..(15): Xaa is C or S
KYLMSIPSTKVPAXXT

SEQ ID NO: 9725 - protein, 18 aa, Artificial Sequence
  Cyclic GFR-binding peptide
  MOD_RES (14)..(14): Xaa is C or S
KYLVSIPSLKTPAXTPKT

SEQ ID NO: 9726 - protein, 15 aa, Artificial Sequence
  Cyclic GFR-binding peptide
  MOD_RES (14)..(14): Xaa is C or S
FYLVNIPSLKTPAXT

SEQ ID NO: 9727 - protein, 16 aa, Artificial Sequence
  Cyclic GFR-binding peptide
LLVRGNDYYLMSTAST

SEQ ID NO: 9728 - protein, 18 aa, Artificial Sequence
  Cyclic GFR-binding peptide
  MOD_RES (14)..(15): Xaa is C or S
KYLVSIPSLKTPAXXPKP

SEQ ID NO: 9729 - protein, 16 aa, Artificial Sequence
  Cyclic GFR-binding peptide
VVNNASDFYLISIANL

SEQ ID NO: 9730 - protein, 15 aa, Artificial Sequence
  Cyclic GFR-binding peptide
VVKENEDFYLMSIAN

SEQ ID NO: 9731 - protein, 19 aa, Artificial Sequence
  Cyclic GFR-binding peptide
VVKDYEDLYLMSIPELETP

SEQ ID NO: 9732 - protein, 13 aa, Artificial Sequence
  Cyclic GFR-binding peptide
KYLVSIPSLKTPA

SEQ ID NO: 9733 - protein, 13 aa, Artificial Sequence
  Cyclic GFR-binding peptide
FYLMSIANTKVPA

SEQ ID NO: 9734 - protein, 18 aa, Artificial Sequence
  Cyclic GFR-binding peptide
TPVGMDDFYLVSIANLKT

SEQ ID NO: 9735 - protein, 16 aa, Artificial Sequence
  Cyclic GFR-binding peptide
VKPKRGVFYLINIPSL

SEQ ID NO: 9736 - protein, 17 aa, Artificial Sequence
  Cyclic GFR-binding peptide
YTVVGKDKYLISIPSLK

SEQ ID NO: 9737 - protein, 15 aa, Artificial Sequence
  Cyclic GFR-binding peptide
TPVGMDDLYLVSIPE

SEQ ID NO: 9738 - protein, 20 aa, Artificial Sequence
  Cyclic GFR-binding peptide
  MOD_RES (14)..(15): Xaa is C or S
LYLVSIPELKTPAXXPKPVY

SEQ ID NO: 9739 - protein, 20 aa, Artificial Sequence
  Cyclic GFR-binding peptide
  MOD_RES (14)..(15): Xaa is C or S
FYLINIPSLDQPVXXPSASA

SEQ ID NO: 9740 - protein, 13 aa, Artificial Sequence
  Cyclic GFR-binding peptide
YYLISTASLKTPV

SEQ ID NO: 9741 - protein, 15 aa, Artificial Sequence
  Cyclic GFR-binding peptide
IIQQKDNYYLMSTAS

SEQ ID NO: 9742 - protein, 19 aa, Artificial Sequence
  Cyclic GFR-binding peptide
  MOD_RES (14)..(15): Xaa is C or S
FYLINIPSLAQPVXXPAAS

SEQ ID NO: 9743 - protein, 27 aa, Artificial Sequence
  Cyclic GFR-binding peptide
  MOD_RES (21)..(22): Xaa is C or S
IVNSSDDFYLVNIPSLQTPAXXPKPVT

SEQ ID NO: 9744 - protein, 20 aa, Artificial Sequence
  Cyclic GFR-binding peptide
  MOD_RES (14)..(15): Xaa is C or S
FYLINIPSLRTPVXXTPPTS

SEQ ID NO: 9745 - protein, 17 aa, Artificial Sequence
  Cyclic GFR-binding peptide
  MOD_RES (14)..(15): Xaa is C or S
KYLMSIPSTKVPAXXTS

SEQ ID NO: 9746 - protein, 13 aa, Artificial Sequence
  Cyclic GFR-binding peptide
YYLVSTASLQTPA

SEQ ID NO: 9747 - protein, 17 aa, Artificial Sequence
  Cyclic GFR-binding peptide
VVKDYEDFYLMNIPSLE

SEQ ID NO: 9748 - protein, 15 aa, Artificial Sequence
  Cyclic GFR-binding peptide
VVNNAADFYLINIPS

SEQ ID NO: 9749 - protein, 15 aa, Artificial Sequence
  Cyclic GFR-binding peptide
  MOD_RES (14)..(15): Xaa is C or S
LYLISIPELRTPVXX

SEQ ID NO: 9750 - protein, 27 aa, Artificial Sequence
  Cyclic GFR-binding peptide
  MOD_RES (21)..(21): Xaa is C or S
IVNSSDDYYLVSTASLKTPAXTPKTVH

SEQ ID NO: 9751 - protein, 14 aa, Artificial Sequence
  Cyclic GFR-binding peptide
  MOD_RES (14)..(14): Xaa is C or S
KYLMSIPSMKTPTX

SEQ ID NO: 9752 - protein, 17 aa, Artificial Sequence
  Cyclic GFR-binding peptide
VVNKNEDFYLISIANMK

SEQ ID NO: 9753 - protein, 17 aa, Artificial Sequence
  Cyclic GFR-binding peptide
IVNNSSDKYLVSIPSLK

SEQ ID NO: 9754 - protein, 14 aa, Artificial Sequence
  Cyclic GFR-binding peptide
  MOD_RES (14)..(14): Xaa is C or S
FYLINIPSMKEPVX

SEQ ID NO: 9755 - protein, 15 aa, Artificial Sequence
  Cyclic GFR-binding peptide
NAISILYFIGKTPKI

SEQ ID NO: 9756 - protein, 16 aa, Artificial Sequence
  Cyclic GFR-binding peptide
LSATSILYYDSANNVV

SEQ ID NO: 9757 - protein, 15 aa, Artificial Sequence
  Cyclic GFR-binding peptide
SPISVLYKDDSSNVI

SEQ ID NO: 9758 - protein, 13 aa, Artificial Sequence
  Cyclic GFR-binding peptide
VPQDLEPISILYL

SEQ ID NO: 9759 - protein, 18 aa, Artificial Sequence
  Cyclic GFR-binding peptide
EKMSPINILYFDENKNVV

SEQ ID NO: 9760 - protein, 13 aa, Artificial Sequence
  Cyclic GFR-binding peptide
VPTRLSATSILYY

SEQ ID NO: 9761 - protein, 14 aa, Artificial Sequence
  Cyclic GFR-binding peptide
  MOD_RES (1)..(1): Xaa is C or S
XVPTKLNAISILYF

SEQ ID NO: 9762 - protein, 13 aa, Artificial Sequence
  Cyclic GFR-binding peptide
VPTELEPISMLYL

SEQ ID NO: 9763 - protein, 19 aa, Artificial Sequence
  Cyclic GFR-binding peptide
PTKLSATSILYYDKGVVTY

SEQ ID NO: 9764 - protein, 19 aa, Artificial Sequence
  Cyclic GFR-binding peptide
  MOD_RES (5)..(6): Xaa is C or S
APASXXVPARLSPISILYK

SEQ ID NO: 9765 - protein, 14 aa, Artificial Sequence
  Cyclic GFR-binding peptide
  MOD_RES (1)..(1): Xaa is C or S
XVSQDLEPISILYL

SEQ ID NO: 9766 - protein, 17 aa, Artificial Sequence
  Cyclic GFR-binding peptide
RLSPISILYKDAANNVV

SEQ ID NO: 9767 - protein, 17 aa, Artificial Sequence
  Cyclic GFR-binding peptide
DLSPISILYKVGRTPKV

SEQ ID NO: 9768 - protein, 14 aa, Artificial Sequence
  Cyclic GFR-binding peptide
  MOD_RES (1)..(1): Xaa is C or S
XVPEKMSATSILYY

SEQ ID NO: 9769 - protein, 17 aa, Artificial Sequence
  Cyclic GFR-binding peptide
  MOD_RES (3)..(4): Xaa is C or S
KAXXAPTKLSPINVLYF

SEQ ID NO: 9770 - protein, 19 aa, Artificial Sequence
  Cyclic GFR-binding peptide
PARLSPISILYKDAANNVV

SEQ ID NO: 9771 - protein, 15 aa, Artificial Sequence
  Cyclic GFR-binding peptide
  MOD_RES (1)..(2): Xaa is C or S
XXVPTELSPINMLYF

SEQ ID NO: 9772 - protein, 16 aa, Artificial Sequence
  Cyclic GFR-binding peptide
  MOD_RES (2)..(3): Xaa is C or S
TXXVPTRLSPINILYF

SEQ ID NO: 9773 - protein, 18 aa, Artificial Sequence
  Cyclic GFR-binding peptide
  MOD_RES (4)..(5): Xaa is C or S
PEPXXVPEKMSPINILYF

SEQ ID NO: 9774 - protein, 20 aa, Artificial Sequence
  Cyclic GFR-binding peptide
  MOD_RES (6)..(7): Xaa is C or S
GSAGPXXTPTKMSPISMLYK

SEQ ID NO: 9775 - protein, 16 aa, Artificial Sequence
  Cyclic GFR-binding peptide
  MOD_RES (3)..(3): Xaa is C or S
PTXAPTKLEPISVLYL

SEQ ID NO: 9776 - protein, 16 aa, Artificial Sequence
  Cyclic GFR-binding peptide
  MOD_RES (2)..(3): Xaa is C or S
PXXAPTQLSATSVLYY

SEQ ID NO: 9777 - protein, 16 aa, Artificial Sequence
  Cyclic GFR-binding peptide
  MOD_RES (2)..(3): Xaa is C or S
PXXVPQALSATSILYY

SEQ ID NO: 9778 - protein, 19 aa, Artificial Sequence
  Cyclic GFR-binding peptide
PTELSPINMLYFDENEKVV

SEQ ID NO: 9779 - protein, 27 aa, Artificial Sequence
  Cyclic GFR-binding peptide
  MOD_RES (6)..(7): Xaa is C or S
ASASPXXVPQDLSPINILYFVGRTPKV

SEQ ID NO: 9780 - protein, 19 aa, Artificial Sequence
  Cyclic GFR-binding peptide
PTKLEPISVLYLDDSSNVI

SEQ ID NO: 9781 - protein, 14 aa, Artificial Sequence
  Cyclic GFR-binding peptide
  MOD_RES (1)..(1): Xaa is C or S
XVPTKLSPISILYK

SEQ ID NO: 9782 - protein, 18 aa, Artificial Sequence
  Cyclic GFR-binding peptide
ARLEPISILYLDAANNVV

SEQ ID NO: 9783 - protein, 20 aa, Artificial Sequence
  Cyclic GFR-binding peptide
  MOD_RES (6)..(7): Xaa is C or S
KVGKAXXVPTKLSPINVLYF

SEQ ID NO: 9784 - protein, 18 aa, Artificial Sequence
  Cyclic GFR-binding peptide
TKLNAISILYFDKGVVTY

SEQ ID NO: 9785 - protein, 18 aa, Artificial Sequence
  Cyclic GFR-binding peptide
  MOD_RES (4)..(5): Xaa is C or S
ASPXXVPQDLSATSILYY

SEQ ID NO: 9786 - protein, 18 aa, Artificial Sequence
  Cyclic GFR-binding peptide
  MOD_RES (4)..(5): Xaa is C or S
AAPXXVPQALSATSILYY

SEQ ID NO: 9787 - protein, 18 aa, Artificial Sequence
  Cyclic GFR-binding peptide
TRLSATSILYYDSANNVV

SEQ ID NO: 9788 - protein, 18 aa, Artificial Sequence
  Cyclic GFR-binding peptide
  MOD_RES (5)..(5): Xaa is C or S
TKPTXAPTKLSPINVLYF

SEQ ID NO: 9789 - protein, 18 aa, Artificial Sequence
  Cyclic GFR-binding peptide
  MOD_RES (4)..(5): Xaa is C or S
PKAXXAPTKLNAISVLYF

SEQ ID NO: 9790 - protein, 19 aa, Artificial Sequence
  Cyclic GFR-binding peptide
  MOD_RES (5)..(6): Xaa is C or S
VPSTXXAPVKTSATSMLYY

SEQ ID NO: 9791 - protein, 18 aa, Artificial Sequence
  Cyclic GFR-binding peptide
TELSATSMLYYDENEKVV

SEQ ID NO: 9792 - protein, 19 aa, Artificial Sequence
  Cyclic GFR-binding peptide
PQDLEPISILYLVGRTPKV

SEQ ID NO: 9793 - protein, 17 aa, Artificial Sequence
  Cyclic GFR-binding peptide
  MOD_RES (3)..(4): Xaa is C or S
SPXXVSQDLEPISILYL

SEQ ID NO: 9794 - protein, 15 aa, Artificial Sequence
  Cyclic GFR-binding peptide
NAISILYFDSANNVV

SEQ ID NO: 9795 - protein, 16 aa, Artificial Sequence
  Cyclic GFR-binding peptide
  MOD_RES (2)..(3): Xaa is C or S
PXXVPEKMSPISILYK

SEQ ID NO: 9796 - protein, 17 aa, Artificial Sequence
  Cyclic GFR-binding peptide
  MOD_RES (3)..(4): Xaa is C or S
KPXXAPTQLSPINVLYF

SEQ ID NO: 9797 - protein, 15 aa, Artificial Sequence
  Cyclic GFR-binding peptide
SPISMLYKNDKQQII

SEQ ID NO: 9798 - protein, 27 aa, Artificial Sequence
  Cyclic GFR-binding peptide
  MOD_RES (6)..(7): Xaa is C or S
GSAGPXXTPTKMSPISMLYKNDKQQII

SEQ ID NO: 9799 - protein, 16 aa, Artificial Sequence
  Cyclic GFR-binding peptide
  MOD_RES (2)..(3): Xaa is C or S
SXXVPARLNAISILYF

SEQ ID NO: 9800 - protein, 27 aa, Artificial Sequence
  Cyclic GFR-binding peptide
  MOD_RES (6)..(7): Xaa is C or S
GIPEPXXVPEKMSPISILYKDENKNVV

SEQ ID NO: 9801 - protein, 18 aa, Artificial Sequence
  Cyclic GFR-binding peptide
  MOD_RES (4)..(5): Xaa is C or S
PSTXXAPVKTSPINMLYF

SEQ ID NO: 9802 - protein, 19 aa, Artificial Sequence
  Cyclic GFR-binding peptide
  MOD_RES (5)..(6): Xaa is C or S
APASXXVPARLNAISILYF

SEQ ID NO: 9803 - protein, 16 aa, Artificial Sequence
  Cyclic GFR-binding peptide
MSPINILYFDENKNVV

SEQ ID NO: 9804 - protein, 15 aa, Artificial Sequence
  Cyclic GFR-binding peptide
SPINILYFDKGVVTY

SEQ ID NO: 9805 - protein, 17 aa, Artificial Sequence
  Cyclic GFR-binding peptide
  MOD_RES (4)..(4): Xaa is C or S
KPTXAPTKLEPISVLYL

SEQ ID NO: 9806 - protein, 17 aa, Artificial Sequence
  Cyclic GFR-binding peptide
ALEPISILYLVGRKPKV

SEQ ID NO: 9807 - protein, 16 aa, Artificial Sequence
  Cyclic GFR-binding peptide
  MOD_RES (2)..(3): Xaa is C or S
SXXVPARLSPISILYK

SEQ ID NO: 9808 - protein, 15 aa, Artificial Sequence
  Cyclic GFR-binding peptide
  MOD_RES (1)..(2): Xaa is C or S
XXVPARLSATSILYY

SEQ ID NO: 9809 - protein, 18 aa, Artificial Sequence
  Cyclic GFR-binding peptide
VKTSATSMLYYDNGRVLL

SEQ ID NO: 9810 - protein, 17 aa, Artificial Sequence
  Cyclic GFR-binding peptide
  MOD_RES (3)..(4): Xaa is C or S
KAXXAPTKLEPISVLYL

SEQ ID NO: 9811 - protein, 14 aa, Artificial Sequence
  Cyclic GFR-binding peptide
  MOD_RES (1)..(1): Xaa is C or S
XVPARLSATSILYY

SEQ ID NO: 9812 - protein, 15 aa, Artificial Sequence
  Cyclic GFR-binding peptide
NAISILYFVGRKPKV

SEQ ID NO: 9813 - protein, 18 aa, Artificial Sequence
  Cyclic GFR-binding peptide
TRLNAISILYFDSANNVV

SEQ ID NO: 9814 - protein, 14 aa, Artificial Sequence
  Cyclic GFR-binding peptide
  MOD_RES (1)..(1): Xaa is C or S
XVPQDLSPINILYF

SEQ ID NO: 9815 - protein, 19 aa, Artificial Sequence
  Cyclic GFR-binding peptide
PVKTSPINMLYFDNGRVLL

SEQ ID NO: 9816 - protein, 15 aa, Artificial Sequence
  Cyclic GFR-binding peptide
EPISVLYLDDSSNVI

SEQ ID NO: 9817 - protein, 20 aa, Artificial Sequence
  Cyclic GFR-binding peptide
  MOD_RES (6)..(7): Xaa is C or S
GSAGPXXTPTKMNAISMLYF

SEQ ID NO: 9818 - protein, 15 aa, Artificial Sequence
  Cyclic GFR-binding peptide
  MOD_RES (1)..(2): Xaa is C or S
XXVPTELEPISMLYL

SEQ ID NO: 9819 - protein, 16 aa, Artificial Sequence
  Cyclic GFR-binding peptide
  MOD_RES (3)..(3): Xaa is C or S
PTXAPTKLSPINVLYF

SEQ ID NO: 9820 - protein, 17 aa, Artificial Sequence
  Cyclic GFR-binding peptide
DLEPISILYLVGRTPKV

SEQ ID NO: 9821 - protein, 19 aa, Artificial Sequence
  Cyclic GFR-binding peptide
PARLNAISILYFDAANNVV

SEQ ID NO: 9822 - protein, 16 aa, Artificial Sequence
  Cyclic GFR-binding peptide
LSPINILYFVGRTPKV

SEQ ID NO: 9823 - protein, 17 aa, Artificial Sequence
  Cyclic GFR-binding peptide
  MOD_RES (3)..(4): Xaa is C or S
APXXVPQALSPINILYF

SEQ ID NO: 9824 - protein, 15 aa, Artificial Sequence
  Cyclic GFR-binding peptide
  MOD_RES (1)..(2): Xaa is C or S
XXVPQDLEPISILYL

SEQ ID NO: 9825 - protein, 16 aa, Artificial Sequence
  Cyclic GFR-binding peptide
LSATSILYYIGKTPKI

SEQ ID NO: 9826 - protein, 20 aa, Artificial Sequence
  Cyclic GFR-binding peptide
  MOD_RES (6)..(7): Xaa is C or S
AVPKAXXAPTKLNAISVLYF

SEQ ID NO: 9827 - protein, 14 aa, Artificial Sequence
  Cyclic GFR-binding peptide
  MOD_RES (1)..(1): Xaa is C or S
XAPTQLEPISVLYL

SEQ ID NO: 9828 - protein, 17 aa, Artificial Sequence
  Cyclic GFR-binding peptide
  MOD_RES (3)..(4): Xaa is C or S
GPXXTPTKMSATSMLYY

SEQ ID NO: 9829 - protein, 17 aa, Artificial Sequence
  Cyclic GFR-binding peptide
RLNAISILYFDAANNVV

SEQ ID NO: 9830 - protein, 19 aa, Artificial Sequence
  Cyclic GFR-binding peptide
PVKTSATSMLYYDNGRVLL

SEQ ID NO: 9831 - protein, 19 aa, Artificial Sequence
  Cyclic GFR-binding peptide
  MOD_RES (5)..(6): Xaa is C or S
SAAPXXVPQALEPISILYL

SEQ ID NO: 9832 - protein, 17 aa, Artificial Sequence
  Cyclic GFR-binding peptide
KLEPISVLYLDSSNNVI

SEQ ID NO: 9833 - protein, 15 aa, Artificial Sequence
  Cyclic GFR-binding peptide
SATSILYYVGRKPKV

SEQ ID NO: 9834 - protein, 18 aa, Artificial Sequence
  Cyclic GFR-binding peptide
  MOD_RES (4)..(5): Xaa is C or S
PASXXVPARLSPINILYF

SEQ ID NO: 9835 - protein, 17 aa, Artificial Sequence
  Cyclic GFR-binding peptide
  MOD_RES (3)..(4): Xaa is C or S
SPXXVPQDLSPINILYF

SEQ ID NO: 9836 - protein, 15 aa, Artificial Sequence
  Cyclic GFR-binding peptide
  MOD_RES (1)..(2): Xaa is C or S
XXTPTKMEPISMLYL

SEQ ID NO: 9837 - protein, 15 aa, Artificial Sequence
  Cyclic GFR-binding peptide
SATSILYYIGKTPKI

SEQ ID NO: 9838 - protein, 13 aa, Artificial Sequence
  Cyclic GFR-binding peptide
TPTKMEPISMLYL

SEQ ID NO: 9839 - protein, 15 aa, Artificial Sequence
  Cyclic GFR-binding peptide
  MOD_RES (2)..(2): Xaa is C or S
TXAPTKLSATSVLYY

SEQ ID NO: 9840 - protein, 27 aa, Artificial Sequence
  Cyclic GFR-binding peptide
  MOD_RES (6)..(7): Xaa is C or S
KIPKAXXVPTELEPISMLYLDENEKVV

SEQ ID NO: 9841 - protein, 20 aa, Artificial Sequence
  Cyclic GFR-binding peptide
  MOD_RES (6)..(7): Xaa is C or S
HVPKPXXAPTKLSPISVLYK

SEQ ID NO: 9842 - protein, 16 aa, Artificial Sequence
  Cyclic GFR-binding peptide
LEPISVLYLDSSNNVI

SEQ ID NO: 9843 - protein, 19 aa, Artificial Sequence
  Cyclic GFR-binding peptide
PTKLNAISILYFDKGVVTY

SEQ ID NO: 9844 - protein, 16 aa, Artificial Sequence
  Cyclic GFR-binding peptide
  MOD_RES (2)..(3): Xaa is C or S
PXXAPTKLEPISVLYL

SEQ ID NO: 9845 - protein, 27 aa, Artificial Sequence
  Cyclic GFR-binding peptide
  MOD_RES (6)..(7): Xaa is C or S
SIPKAXXVPTELSPISMLYKDEYDKVV

SEQ ID NO: 9846 - protein, 27 aa, Artificial Sequence
  Cyclic GFR-binding peptide
  MOD_RES (6)..(7): Xaa is C or S
AAPASXXVPARLEPISILYLDAANNVV

SEQ ID NO: 9847 - protein, 17 aa, Artificial Sequence
  Cyclic GFR-binding peptide
KLSPINILYFDKGVVTY

SEQ ID NO: 9848 - protein, 27 aa, Artificial Sequence
  Cyclic GFR-binding peptide
  MOD_RES (6)..(7): Xaa is C or S
AVPKAXXAPTKLNAISVLYFDSSNNVI

SEQ ID NO: 9849 - protein, 15 aa, Artificial Sequence
  Cyclic GFR-binding peptide
SPISILYKDSANNVV

SEQ ID NO: 9850 - protein, 20 aa, Artificial Sequence
  Cyclic GFR-binding peptide
  MOD_RES (6)..(7): Xaa is C or S
SIPKAXXVPTELSATSMLYY

SEQ ID NO: 9851 - protein, 17 aa, Artificial Sequence
  Cyclic GFR-binding peptide
DLNAISILYFVGRTPKV

SEQ ID NO: 9852 - protein, 17 aa, Artificial Sequence
  Cyclic GFR-binding peptide
  MOD_RES (3)..(4): Xaa is C or S
KAXXVPTELNAISMLYF

SEQ ID NO: 9853 - protein, 15 aa, Artificial Sequence
  Cyclic GFR-binding peptide
SATSMLYYDNGRVLL

SEQ ID NO: 9854 - protein, 17 aa, Artificial Sequence
  Cyclic GFR-binding peptide
QLSPISVLYKDDSSNVI

SEQ ID NO: 9855 - protein, 16 aa, Artificial Sequence
  Cyclic GFR-binding peptide
LSPINILYFDKGVVTY

SEQ ID NO: 9856 - protein, 19 aa, Artificial Sequence
  Cyclic GFR-binding peptide
PARLEPISILYLDAANNVV

SEQ ID NO: 9857 - protein, 19 aa, Artificial Sequence
  Cyclic GFR-binding peptide
PQALEPISILYLVGRKPKV

SEQ ID NO: 9858 - protein, 19 aa, Artificial Sequence
  Cyclic GFR-binding peptide
  MOD_RES (5)..(6): Xaa is C or S
SASPXXVPQDLEPISILYL

SEQ ID NO: 9859 - protein, 17 aa, Artificial Sequence
  Cyclic GFR-binding peptide
KLSPISVLYKDDSSNVI

SEQ ID NO: 9860 - protein, 19 aa, Artificial Sequence
  Cyclic GFR-binding peptide
PTKLSPINVLYFDDMGVPT

SEQ ID NO: 9861 - protein, 20 aa, Artificial Sequence
  Cyclic GFR-binding peptide
  MOD_RES (6)..(7): Xaa is C or S
KVGKAXXVPTKLEPISVLYL

SEQ ID NO: 9862 - protein, 27 aa, Artificial Sequence
  Cyclic GFR-binding peptide
  MOD_RES (6)..(7): Xaa is C or S
YVPKPXXAPTKLSPINVLYFDDSSNVI

SEQ ID NO: 9863 - protein, 17 aa, Artificial Sequence
  Cyclic GFR-binding peptide
  MOD_RES (3)..(4): Xaa is C or S
KAXXVPTKLSPINVLYF

SEQ ID NO: 9864 - protein, 15 aa, Artificial Sequence
  Cyclic GFR-binding peptide
NAISMLYFDNGRVLL

SEQ ID NO: 9865 - protein, 17 aa, Artificial Sequence
  Cyclic GFR-binding peptide
  MOD_RES (3)..(4): Xaa is C or S
KAXXVPTELSPISMLYK

SEQ ID NO: 9866 - protein, 18 aa, Artificial Sequence
  Cyclic GFR-binding peptide
TKMSATSMLYYNDKQQII

SEQ ID NO: 9867 - protein, 17 aa, Artificial Sequence
  Cyclic GFR-binding peptide
  MOD_RES (3)..(4): Xaa is C or S
APXXVPQALEPISILYL

SEQ ID NO: 9868 - protein, 20 aa, Artificial Sequence
  Cyclic GFR-binding peptide
  MOD_RES (6)..(7): Xaa is C or S
TVPKPXXAPTQLSPISVLYK

SEQ ID NO: 9869 - protein, 16 aa, Artificial Sequence
  Cyclic GFR-binding peptide
  MOD_RES (2)..(3): Xaa is C or S
AXXVPTELSPINMLYF

SEQ ID NO: 9870 - protein, 15 aa, Artificial Sequence
  Cyclic GFR-binding peptide
  MOD_RES (1)..(2): Xaa is C or S
XXAPVKTSATSMLYY

SEQ ID NO: 9871 - protein, 19 aa, Artificial Sequence
  Cyclic GFR-binding peptide
  MOD_RES (5)..(6): Xaa is C or S
SASPXXVPQDLSPINILYF

SEQ ID NO: 9872 - protein, 20 aa, Artificial Sequence
  Cyclic GFR-binding peptide
  MOD_RES (6)..(7): Xaa is C or S
GIPEPXXVPEKMSATSILYY

SEQ ID NO: 9873 - protein, 14 aa, Artificial Sequence
  Cyclic GFR-binding peptide
  MOD_RES (1)..(1): Xaa is C or S
XVPQALSPINILYF

SEQ ID NO: 9874 - protein, 17 aa, Artificial Sequence
  Cyclic GFR-binding peptide
  MOD_RES (3)..(4): Xaa is C or S
PTXXVPTRLSATSILYY

SEQ ID NO: 9875 - protein, 27 aa, Artificial Sequence
  Cyclic GFR-binding peptide
  MOD_RES (6)..(7): Xaa is C or S
TVPKPXXAPTQLSATSVLYYDDSSNVI

SEQ ID NO: 9876 - protein, 16 aa, Artificial Sequence
  Cyclic GFR-binding peptide
LSATSILYYVGRKPKV

SEQ ID NO: 9877 - protein, 20 aa, Artificial Sequence
  Cyclic GFR-binding peptide
  MOD_RES (6)..(7): Xaa is C or S
AVPKAXXAPTKLSPISVLYK

SEQ ID NO: 9878 - protein, 27 aa, Artificial Sequence
  Cyclic GFR-binding peptide
  MOD_RES (7)..(7): Xaa is C or S
HVTKPTXAPTKLEPISVLYLDDSSNVI

SEQ ID NO: 9879 - protein, 27 aa, Artificial Sequence
  Cyclic GFR-binding peptide
  MOD_RES (6)..(7): Xaa is C or S
SIPKAXXVPTELNAISMLYFDEYDKVV

SEQ ID NO: 9880 - protein, 18 aa, Artificial Sequence
  Cyclic GFR-binding peptide
  MOD_RES (4)..(5): Xaa is C or S
PSTXXAPVKTEPISMLYL

SEQ ID NO: 9881 - protein, 17 aa, Artificial Sequence
  Cyclic GFR-binding peptide
KLEPISVLYLDDSSNVI

SEQ ID NO: 9882 - protein, 17 aa, Artificial Sequence
  Cyclic GFR-binding peptide
QLEPISVLYLDDSSNVI

SEQ ID NO: 9883 - protein, 17 aa, Artificial Sequence
  Cyclic GFR-binding peptide
RLSPINILYFDSANNVV

SEQ ID NO: 9884 - protein, 19 aa, Artificial Sequence
  Cyclic GFR-binding peptide
PQDLSPISILYKVGRTPKV

SEQ ID NO: 9885 - protein, 20 aa, Artificial Sequence
  Cyclic GFR-binding peptide
  MOD_RES (6)..(7): Xaa is C or S
TVPKPXXAPTQLEPISVLYL

SEQ ID NO: 9886 - protein, 27 aa, Artificial Sequence
  Cyclic GFR-binding peptide
  MOD_RES (6)..(7): Xaa is C or S
RVPSTXXAPVKTEPISMLYLDNGRVLL

SEQ ID NO: 9887 - protein, 20 aa, Artificial Sequence
  Cyclic GFR-binding peptide
  MOD_RES (6)..(7): Xaa is C or S
AAPASXXVPARLSATSILYY

SEQ ID NO: 9888 - protein, 15 aa, Artificial Sequence
  Cyclic GFR-binding peptide
EPISILYLDSANNVV

SEQ ID NO: 9889 - protein, 19 aa, Artificial Sequence
  Cyclic GFR-binding peptide
  MOD_RES (5)..(6): Xaa is C or S
VPKPXXAPTQLEPISVLYL

SEQ ID NO: 9890 - protein, 19 aa, Artificial Sequence
  Cyclic GFR-binding peptide
PEKMSPINILYFDENKNVV

SEQ ID NO: 9891 - protein, 16 aa, Artificial Sequence
  Cyclic GFR-binding peptide
  MOD_RES (2)..(3): Xaa is C or S
TXXAPVKTSPINMLYF

SEQ ID NO: 9892 - protein, 19 aa, Artificial Sequence
  Cyclic GFR-binding peptide
  MOD_RES (5)..(6): Xaa is C or S
SASPXXVSQDLSPISILYK

SEQ ID NO: 9893 - protein, 18 aa, Artificial Sequence
  Cyclic GFR-binding peptide
  MOD_RES (4)..(5): Xaa is C or S
ASPXXVSQDLSPINILYF

SEQ ID NO: 9894 - protein, 27 aa, Artificial Sequence
  Cyclic GFR-binding peptide
  MOD_RES (6)..(7): Xaa is C or S
KIPKAXXVPTELSPISMLYKDENEKVV

SEQ ID NO: 9895 - protein, 18 aa, Artificial Sequence
  Cyclic GFR-binding peptide
  MOD_RES (4)..(5): Xaa is C or S
PPTXXVPTRLSPISILYK

SEQ ID NO: 9896 - protein, 19 aa, Artificial Sequence
  Cyclic GFR-binding peptide
PTKLSPISVLYKDDSSNVI

SEQ ID NO: 9897 - protein, 15 aa, Artificial Sequence
  Cyclic GFR-binding peptide
SPINILYFVGRTPKV

SEQ ID NO: 9898 - protein, 16 aa, Artificial Sequence
  Cyclic GFR-binding peptide
  MOD_RES (2)..(3): Xaa is C or S
PXXAPTKLSPINVLYF

SEQ ID NO: 9899 - protein, 18 aa, Artificial Sequence
  Cyclic GFR-binding peptide
TRLSPISILYKDSANNVV

SEQ ID NO: 9900 - protein, 17 aa, Artificial Sequence
  Cyclic GFR-binding peptide
ALSPISILYKVGRKPKV

SEQ ID NO: 9901 - protein, 19 aa, Artificial Sequence
  Cyclic GFR-binding peptide
  MOD_RES (5)..(6): Xaa is C or S
VPKAXXAPTKLSPINVLYF

SEQ ID NO: 9902 - protein, 15 aa, Artificial Sequence
  Cyclic GFR-binding peptide
EPISVLYLDSSNNVI

SEQ ID NO: 9903 - protein, 16 aa, Artificial Sequence
  Cyclic GFR-binding peptide
  MOD_RES (2)..(3): Xaa is C or S
PXXTPTKMSPISMLYK

SEQ ID NO: 9904 - protein, 20 aa, Artificial Sequence
  Cyclic GFR-binding peptide
  MOD_RES (6)..(7): Xaa is C or S
KIPKAXXVPTELNAISMLYF

SEQ ID NO: 9905 - protein, 16 aa, Artificial Sequence
  Cyclic GFR-binding peptide
TSPISMLYKDNGRVLL

SEQ ID NO: 9906 - protein, 19 aa, Artificial Sequence
  Cyclic GFR-binding peptide
PTKLSPINILYFDKGVVTY

SEQ ID NO: 9907 - protein, 14 aa, Artificial Sequence
  Cyclic GFR-binding peptide
  MOD_RES (1)..(1): Xaa is C or S
XVPTRLSATSILYY

SEQ ID NO: 9908 - protein, 13 aa, Artificial Sequence
  Cyclic GFR-binding peptide
APVKTSATSMLYY

SEQ ID NO: 9909 - protein, 19 aa, Artificial Sequence
  Cyclic GFR-binding peptide
PTQLSPISVLYKDDSSNVI

SEQ ID NO: 9910 - protein, 13 aa, Artificial Sequence
  Cyclic GFR-binding peptide
VPTKLNAISILYF

SEQ ID NO: 9911 - protein, 14 aa, Artificial Sequence
  Cyclic GFR-binding peptide
  MOD_RES (1)..(1): Xaa is C or S
XTPTKMEPISMLYL

SEQ ID NO: 9912 - protein, 27 aa, Artificial Sequence
  Cyclic GFR-binding peptide
  MOD_RES (6)..(7): Xaa is C or S
ASAAPXXVPQALSPISILYKVGRKPKV

SEQ ID NO: 9913 - protein, 18 aa, Artificial Sequence
  Cyclic GFR-binding peptide
  MOD_RES (4)..(5): Xaa is C or S
AGPXXTPTKMNAISMLYF

SEQ ID NO: 9914 - protein, 15 aa, Artificial Sequence
  Cyclic GFR-binding peptide
  MOD_RES (1)..(2): Xaa is C or S
XXVPTKLNAISILYF

SEQ ID NO: 9915 - protein, 15 aa, Artificial Sequence
  Cyclic GFR-binding peptide
  MOD_RES (1)..(2): Xaa is C or S
XXVPQALNAISILYF

SEQ ID NO: 9916 - protein, 17 aa, Artificial Sequence
  Cyclic GFR-binding peptide
KLSATSILYYDKGVVTY

SEQ ID NO: 9917 - protein, 13 aa, Artificial Sequence
  Cyclic GFR-binding peptide
VPQALNAISILYF

SEQ ID NO: 9918 - protein, 18 aa, Artificial Sequence
  Cyclic GFR-binding peptide
VKTNAISMLYFDNGRVLL

SEQ ID NO: 9919 - protein, 18 aa, Artificial Sequence
  Cyclic GFR-binding peptide
  MOD_RES (4)..(5): Xaa is C or S
PKPXXAPTKLSPINVLYF

SEQ ID NO: 9920 - protein, 16 aa, Artificial Sequence
  Cyclic GFR-binding peptide
LEPISILYLDAANNVV

SEQ ID NO: 9921 - protein, 19 aa, Artificial Sequence
  Cyclic GFR-binding peptide
PQALSPISILYKVGRKPKV

SEQ ID NO: 9922 - protein, 19 aa, Artificial Sequence
  Cyclic GFR-binding peptide
PTRLSPINILYFDSANNVV

SEQ ID NO: 9923 - protein, 16 aa, Artificial Sequence
  Cyclic GFR-binding peptide
TNAISMLYFDNGRVLL

SEQ ID NO: 9924 - protein, 14 aa, Artificial Sequence
  Cyclic GFR-binding peptide
  MOD_RES (1)..(1): Xaa is C or S
XVPTELSATSMLYY

SEQ ID NO: 9925 - protein, 18 aa, Artificial Sequence
  Cyclic GFR-binding peptide
TKLSPISILYKDKGVVTY

SEQ ID NO: 9926 - protein, 27 aa, Artificial Sequence
  Cyclic GFR-binding peptide
  MOD_RES (6)..(7): Xaa is C or S
ASAAPXXVPQALEPISILYLVGRKPKV

SEQ ID NO: 9927 - protein, 15 aa, Artificial Sequence
  Cyclic GFR-binding peptide
NAISILYFDKGVVTY

SEQ ID NO: 9928 - protein, 17 aa, Artificial Sequence
  Cyclic GFR-binding peptide
ALNAISILYFVGRKPKV

SEQ ID NO: 9929 - protein, 27 aa, Artificial Sequence
  Cyclic GFR-binding peptide
  MOD_RES (6)..(7): Xaa is C or S
GSAGPXXTPTKMSATSMLYYNDKQQII

SEQ ID NO: 9930 - protein, 16 aa, Artificial Sequence
  Cyclic GFR-binding peptide
  MOD_RES (2)..(3): Xaa is C or S
PXXVPQDLSATSILYY

SEQ ID NO: 9931 - protein, 16 aa, Artificial Sequence
  Cyclic GFR-binding peptide
LSPINVLYFDDSSNVI

SEQ ID NO: 9932 - protein, 18 aa, Artificial Sequence
  Cyclic GFR-binding peptide
  MOD_RES (4)..(5): Xaa is C or S
SKAXXVPTKLSATSILYY

SEQ ID NO: 9933 - protein, 16 aa, Artificial Sequence
  Cyclic GFR-binding peptide
LSATSILYYVGRTPKV

SEQ ID NO: 9934 - protein, 18 aa, Artificial Sequence
  Cyclic GFR-binding peptide
TKLSATSVLYYDDMGVPT

SEQ ID NO: 9935 - protein, 18 aa, Artificial Sequence
  Cyclic GFR-binding peptide
  MOD_RES (4)..(5): Xaa is C or S
GKAXXVPTKLSATSVLYY

SEQ ID NO: 9936 - protein, 16 aa, Artificial Sequence
  Cyclic GFR-binding peptide
  MOD_RES (2)..(3): Xaa is C or S
PXXVPEKMNAISILYF

SEQ ID NO: 9937 - protein, 15 aa, Artificial Sequence
  Cyclic GFR-binding peptide
SPISMLYKDNGRVLL

SEQ ID NO: 9938 - protein, 27 aa, Artificial Sequence
  Cyclic GFR-binding peptide
  MOD_RES (6)..(7): Xaa is C or S
AVPKAXXAPTKLSPISVLYKDSSNNVI

SEQ ID NO: 9939 - protein, 27 aa, Artificial Sequence
  Cyclic GFR-binding peptide
  MOD_RES (6)..(7): Xaa is C or S
HVPKPXXAPTKLEPISVLYLDDSSNVI

SEQ ID NO: 9940 - protein, 16 aa, Artificial Sequence
  Cyclic GFR-binding peptide
  MOD_RES (2)..(3): Xaa is C or S
PXXVSQDLSATSILYY

SEQ ID NO: 9941 - protein, 20 aa, Artificial Sequence
  Cyclic GFR-binding peptide
  MOD_RES (6)..(7): Xaa is C or S
STPPTXXVPTRLSPISILYK

SEQ ID NO: 9942 - protein, 20 aa, Artificial Sequence
  Cyclic GFR-binding peptide
  MOD_RES (6)..(7): Xaa is C or S
ASASPXXVPQDLSPISILYK

SEQ ID NO: 9943 - protein, 15 aa, Artificial Sequence
  Cyclic GFR-binding peptide
SPINILYFVGRKPKV

SEQ ID NO: 9944 - protein, 15 aa, Artificial Sequence
  Cyclic GFR-binding peptide
  MOD_RES (1)..(2): Xaa is C or S
XXVPTRLSATSILYY

SEQ ID NO: 9945 - protein, 14 aa, Artificial Sequence
  Cyclic GFR-binding peptide
  MOD_RES (1)..(1): Xaa is C or S
XVSQDLSPINILYF

SEQ ID NO: 9946 - protein, 17 aa, Artificial Sequence
  Cyclic GFR-binding peptide
  MOD_RES (3)..(4): Xaa is C or S
KAXXVPTKLEPISVLYL

SEQ ID NO: 9947 - protein, 27 aa, Artificial Sequence
  Cyclic GFR-binding peptide
  MOD_RES (6)..(7): Xaa is C or S
GIPEPXXVPEKMSATSILYYDENKNVV

SEQ ID NO: 9948 - protein, 19 aa, Artificial Sequence
  Cyclic GFR-binding peptide
  MOD_RES (5)..(6): Xaa is C or S
VGKAXXVPTKLNAISVLYF

SEQ ID NO: 9949 - protein, 14 aa, Artificial Sequence
  Cyclic GFR-binding peptide
  MOD_RES (1)..(1): Xaa is C or S
XVPQALEPISILYL

SEQ ID NO: 9950 - protein, 19 aa, Artificial Sequence
  Cyclic GFR-binding peptide
PTRLNAISILYFDSANNVV

SEQ ID NO: 9951 - protein, 17 aa, Artificial Sequence
  Cyclic GFR-binding peptide
  MOD_RES (3)..(4): Xaa is C or S
EPXXVPEKMNAISILYF

SEQ ID NO: 9952 - protein, 15 aa, Artificial Sequence
  Cyclic GFR-binding peptide
EPISMLYLNDKQQII

SEQ ID NO: 9953 - protein, 14 aa, Artificial Sequence
  Cyclic GFR-binding peptide
  MOD_RES (1)..(1): Xaa is C or S
XAPVKTSATSMLYY

SEQ ID NO: 9954 - protein, 27 aa, Artificial Sequence
  Cyclic GFR-binding peptide
  MOD_RES (6)..(7): Xaa is C or S
AAPASXXVPARLSPISILYKDAANNVV

SEQ ID NO: 9955 - protein, 18 aa, Artificial Sequence
  Cyclic GFR-binding peptide
  MOD_RES (5)..(5): Xaa is C or S
TKPTXAPTKLEPISVLYL

SEQ ID NO: 9956 - protein, 16 aa, Artificial Sequence
  Cyclic GFR-binding peptide
  MOD_RES (2)..(3): Xaa is C or S
TXXAPVKTEPISMLYL

SEQ ID NO: 9957 - protein, 17 aa, Artificial Sequence
  Cyclic GFR-binding peptide
DLEPISILYLIGKTPKI

SEQ ID NO: 9958 - protein, 20 aa, Artificial Sequence
  Cyclic GFR-binding peptide
  MOD_RES (6)..(7): Xaa is C or S
ASAAPXXVPQALNAISILYF

SEQ ID NO: 9959 - protein, 27 aa, Artificial Sequence
  Cyclic GFR-binding peptide
  MOD_RES (6)..(7): Xaa is C or S
HVPKPXXAPTKLSPINVLYFDDSSNVI

SEQ ID NO: 9960 - protein, 17 aa, Artificial Sequence
  Cyclic GFR-binding peptide
KMSATSILYYDENKNVV

SEQ ID NO: 9961 - protein, 17 aa, Artificial Sequence
  Cyclic GFR-binding peptide
KTEPISMLYLDNGRVLL

SEQ ID NO: 9962 - protein, 15 aa, Artificial Sequence
  Cyclic GFR-binding peptide
  MOD_RES (1)..(2): Xaa is C or S
XXVPQDLSPINILYF

SEQ ID NO: 9963 - protein, 19 aa, Artificial Sequence
  Cyclic GFR-binding peptide
PTQLEPISVLYLDDSSNVI

SEQ ID NO: 9964 - protein, 16 aa, Artificial Sequence
  Cyclic GFR-binding peptide
MSATSILYYDENKNVV

SEQ ID NO: 9965 - protein, 19 aa, Artificial Sequence
  Cyclic GFR-binding peptide
  MOD_RES (5)..(6): Xaa is C or S
IPEPXXVPEKMSPISILYK

SEQ ID NO: 9966 - protein, 17 aa, Artificial Sequence
  Cyclic GFR-binding peptide
  MOD_RES (3)..(4): Xaa is C or S
KPXXAPTQLEPISVLYL

SEQ ID NO: 9967 - protein, 16 aa, Artificial Sequence
  Cyclic GFR-binding peptide
  MOD_RES (2)..(3): Xaa is C or S
TXXAPVKTNAISMLYF

SEQ ID NO: 9968 - protein, 19 aa, Artificial Sequence
  Cyclic GFR-binding peptide
  MOD_RES (5)..(6): Xaa is C or S
TPPTXXVPTRLSATSILYY

SEQ ID NO: 9969 - protein, 20 aa, Artificial Sequence
  Cyclic GFR-binding peptide
  MOD_RES (6)..(7): Xaa is C or S
RVPSTXXAPVKTSATSMLYY

SEQ ID NO: 9970 - protein, 16 aa, Artificial Sequence
  Cyclic GFR-binding peptide
LEPISVLYLDDSSNVI

SEQ ID NO: 9971 - protein, 16 aa, Artificial Sequence
  Cyclic GFR-binding peptide
TEPISMLYLDNGRVLL

SEQ ID NO: 9972 - protein, 15 aa, Artificial Sequence
  Cyclic GFR-binding peptide
NAISILYFVGRTPKV

SEQ ID NO: 9973 - protein, 27 aa, Artificial Sequence
  Cyclic GFR-binding peptide
  MOD_RES (6)..(7): Xaa is C or S
SIPKAXXVPTELEPISMLYLDEYDKVV

SEQ ID NO: 9974 - protein, 17 aa, Artificial Sequence
  Cyclic GFR-binding peptide
  MOD_RES (3)..(4): Xaa is C or S
KAXXVPTKLSPINILYF

SEQ ID NO: 9975 - protein, 17 aa, Artificial Sequence
  Cyclic GFR-binding peptide
  MOD_RES (3)..(4): Xaa is C or S
ASXXVPARLSATSILYY

SEQ ID NO: 9976 - protein, 19 aa, Artificial Sequence
  Cyclic GFR-binding peptide
SQDLSATSILYYIGKTPKI

SEQ ID NO: 9977 - protein, 18 aa, Artificial Sequence
  Cyclic GFR-binding peptide
  MOD_RES (4)..(5): Xaa is C or S
PEPXXVPEKMEPISILYL

SEQ ID NO: 9978 - protein, 18 aa, Artificial Sequence
  Cyclic GFR-binding peptide
VKTSPISMLYKDNGRVLL

SEQ ID NO: 9979 - protein, 27 aa, Artificial Sequence
  Cyclic GFR-binding peptide
  MOD_RES (6)..(7): Xaa is C or S
ASAAPXXVPQALNAISILYFVGRKPKV

SEQ ID NO: 9980 - protein, 16 aa, Artificial Sequence
  Cyclic GFR-binding peptide
  MOD_RES (2)..(3): Xaa is C or S
AXXVPTELEPISMLYL

SEQ ID NO: 9981 - protein, 15 aa, Artificial Sequence
  Cyclic GFR-binding peptide
NAISMLYFNDKQQII

SEQ ID NO: 9982 - protein, 13 aa, Artificial Sequence
  Cyclic GFR-binding peptide
APTQLEPISVLYL

SEQ ID NO: 9983 - protein, 14 aa, Artificial Sequence
  Cyclic GFR-binding peptide
  MOD_RES (1)..(1): Xaa is C or S
XVPQDLEPISILYL

SEQ ID NO: 9984 - protein, 19 aa, Artificial Sequence
  Cyclic GFR-binding peptide
  MOD_RES (5)..(6): Xaa is C or S
VPKAXXAPTKLEPISVLYL

SEQ ID NO: 9985 - protein, 15 aa, Artificial Sequence
  Cyclic GFR-binding peptide
  MOD_RES (1)..(2): Xaa is C or S
XXAPTQLEPISVLYL

SEQ ID NO: 9986 - protein, 18 aa, Artificial Sequence
  Cyclic GFR-binding peptide
TELSPINMLYFDEYDKVV

SEQ ID NO: 9987 - protein, 16 aa, Artificial Sequence
  Cyclic GFR-binding peptide
  MOD_RES (2)..(3): Xaa is C or S
PXXTPTKMSATSMLYY

SEQ ID NO: 9988 - protein, 16 aa, Artificial Sequence
  Cyclic GFR-binding peptide
  MOD_RES (2)..(3): Xaa is C or S
TXXVPTRLEPISILYL

SEQ ID NO: 9989 - protein, 27 aa, Artificial Sequence
  Cyclic GFR-binding peptide
  MOD_RES (6)..(7): Xaa is C or S
STPPTXXVPTRLEPISILYLDSANNVV

SEQ ID NO: 9990 - protein, 13 aa, Artificial Sequence
  Cyclic GFR-binding peptide
VPQDLSPINILYF

SEQ ID NO: 9991 - protein, 17 aa, Artificial Sequence
  Cyclic GFR-binding peptide
  MOD_RES (3)..(4): Xaa is C or S
STXXAPVKTNAISMLYF

SEQ ID NO: 9992 - protein, 15 aa, Artificial Sequence
  Cyclic GFR-binding peptide
EPISILYLDENKNVV

SEQ ID NO: 9993 - protein, 17 aa, Artificial Sequence
  Cyclic GFR-binding peptide
  MOD_RES (3)..(4): Xaa is C or S
KAXXVPTKLSATSVLYY

SEQ ID NO: 9994 - protein, 19 aa, Artificial Sequence
  Cyclic GFR-binding peptide
  MOD_RES (5)..(6): Xaa is C or S
SASPXXVSQDLSPINILYF

SEQ ID NO: 9995 - protein, 19 aa, Artificial Sequence
  Cyclic GFR-binding peptide
PTELNAISMLYFDENEKVV

SEQ ID NO: 9996 - protein, 27 aa, Artificial Sequence
  Cyclic GFR-binding peptide
  MOD_RES (6)..(7): Xaa is C or S
KIPKAXXVPTELNAISMLYFDENEKVV

SEQ ID NO: 9997 - protein, 20 aa, Artificial Sequence
  Cyclic GFR-binding peptide
  MOD_RES (6)..(7): Xaa is C or S
KASKAXXVPTKLSPISILYK

SEQ ID NO: 9998 - protein, 14 aa, Artificial Sequence
  Cyclic GFR-binding peptide
  MOD_RES (1)..(1): Xaa is C or S
XVPTRLSPISILYK

SEQ ID NO: 9999 - protein, 15 aa, Artificial Sequence
  Cyclic GFR-binding peptide
  MOD_RES (1)..(2): Xaa is C or S
XXAPTKLSPISVLYK

SEQ ID NO: 10000 - protein, 13 aa, Artificial Sequence
  Cyclic GFR-binding peptide
VPARLEPISILYL

SEQ ID NO: 10001 - protein, 18 aa, Artificial Sequence
  Cyclic GFR-binding peptide
EKMNAISILYFDENKNVV

SEQ ID NO: 10002 - protein, 15 aa, Artificial Sequence
  Cyclic GFR-binding peptide
  MOD_RES (1)..(2): Xaa is C or S
XXVPEKMEPISILYL

SEQ ID NO: 10003 - protein, 20 aa, Artificial Sequence
  Cyclic GFR-binding peptide
  MOD_RES (6)..(7): Xaa is C or S
GIPEPXXVPEKMNAISILYF

SEQ ID NO: 10004 - protein, 16 aa, Artificial Sequence
  Cyclic GFR-binding peptide
LSPINMLYFDENEKVV

SEQ ID NO: 10005 - protein, 19 aa, Artificial Sequence
  Cyclic GFR-binding peptide
  MOD_RES (5)..(6): Xaa is C or S
APASXXVPARLEPISILYL

SEQ ID NO: 10006 - protein, 16 aa, Artificial Sequence
  Cyclic GFR-binding peptide
  MOD_RES (2)..(3): Xaa is C or S
PXXAPTKLSPISVLYK

SEQ ID NO: 10007 - protein, 17 aa, Artificial Sequence
  Cyclic GFR-binding peptide
  MOD_RES (3)..(4): Xaa is C or S
EPXXVPEKMSPISILYK

SEQ ID NO: 10008 - protein, 19 aa, Artificial Sequence
  Cyclic GFR-binding peptide
  MOD_RES (5)..(6): Xaa is C or S
SAAPXXVPQALSPISILYK

SEQ ID NO: 10009 - protein, 18 aa, Artificial Sequence
  Cyclic GFR-binding peptide
  MOD_RES (4)..(5): Xaa is C or S
PKAXXVPTELEPISMLYL

SEQ ID NO: 10010 - protein, 19 aa, Artificial Sequence
  Cyclic GFR-binding peptide
PEKMSATSILYYDENKNVV

SEQ ID NO: 10011 - protein, 16 aa, Artificial Sequence
  Cyclic GFR-binding peptide
  MOD_RES (2)..(3): Xaa is C or S
TXXVPTRLSATSILYY

SEQ ID NO: 10012 - protein, 19 aa, Artificial Sequence
  Cyclic GFR-binding peptide
  MOD_RES (5)..(6): Xaa is C or S
SAAPXXVPQALNAISILYF

SEQ ID NO: 10013 - protein, 13 aa, Artificial Sequence
  Cyclic GFR-binding peptide
VPQDLSPISILYK

SEQ ID NO: 10014 - protein, 14 aa, Artificial Sequence
  Cyclic GFR-binding peptide
  MOD_RES (1)..(1): Xaa is C or S
XAPTQLSPISVLYK

SEQ ID NO: 10015 - protein, 15 aa, Artificial Sequence
  Cyclic GFR-binding peptide
SPISILYKVGRTPKV

SEQ ID NO: 10016 - protein, 13 aa, Artificial Sequence
  Cyclic GFR-binding peptide
VPQALSPINILYF

SEQ ID NO: 10017 - protein, 16 aa, Artificial Sequence
  Cyclic GFR-binding peptide
LEPISILYLDSANNVV

SEQ ID NO: 10018 - protein, 13 aa, Artificial Sequence
  Cyclic GFR-binding peptide
APTQLSPINVLYF

SEQ ID NO: 10019 - protein, 15 aa, Artificial Sequence
  Cyclic GFR-binding peptide
SPINILYFIGKTPKI

SEQ ID NO: 10020 - protein, 16 aa, Artificial Sequence
  Cyclic GFR-binding peptide
LNAISMLYFDEYDKVV

SEQ ID NO: 10021 - protein, 16 aa, Artificial Sequence
  Cyclic GFR-binding peptide
MSPISILYKDENKNVV

SEQ ID NO: 10022 - protein, 18 aa, Artificial Sequence
  Cyclic GFR-binding peptide
TELSPISMLYKDENEKVV

SEQ ID NO: 10023 - protein, 17 aa, Artificial Sequence
  Cyclic GFR-binding peptide
KLSPINVLYFDDMGVPT

SEQ ID NO: 10024 - protein, 19 aa, Artificial Sequence
  Cyclic GFR-binding peptide
PQDLSATSILYYVGRTPKV

SEQ ID NO: 10025 - protein, 17 aa, Artificial Sequence
  Cyclic GFR-binding peptide
  MOD_RES (3)..(4): Xaa is C or S
KAXXVPTELSATSMLYY

SEQ ID NO: 10026 - protein, 15 aa, Artificial Sequence
  Cyclic GFR-binding peptide
  MOD_RES (1)..(2): Xaa is C or S
XXVPARLSPINILYF

SEQ ID NO: 10027 - protein, 27 aa, Artificial Sequence
  Cyclic GFR-binding peptide
  MOD_RES (7)..(7): Xaa is C or S
HVTKPTXAPTKLSPISVLYKDDSSNVI

SEQ ID NO: 10028 - protein, 18 aa, Artificial Sequence
  Cyclic GFR-binding peptide
QDLSPISILYKVGRTPKV

SEQ ID NO: 10029 - protein, 18 aa, Artificial Sequence
  Cyclic GFR-binding peptide
TKMSPISMLYKNDKQQII

SEQ ID NO: 10030 - protein, 27 aa, Artificial Sequence
  Cyclic GFR-binding peptide
  MOD_RES (6)..(7): Xaa is C or S
RVPSTXXAPVKTNAISMLYFDNGRVLL

SEQ ID NO: 10031 - protein, 18 aa, Artificial Sequence
  Cyclic GFR-binding peptide
QDLSPINILYFIGKTPKI

SEQ ID NO: 10032 - protein, 27 aa, Artificial Sequence
  Cyclic GFR-binding peptide
  MOD_RES (6)..(7): Xaa is C or S
KASKAXXVPTKLSATSILYYDKGVVTY

SEQ ID NO: 10033 - protein, 18 aa, Artificial Sequence
  Cyclic GFR-binding peptide
QALEPISILYLVGRKPKV

SEQ ID NO: 10034 - protein, 16 aa, Artificial Sequence
  Cyclic GFR-binding peptide
LEPISILYLIGKTPKI

SEQ ID NO: 10035 - protein, 19 aa, Artificial Sequence
  Cyclic GFR-binding peptide
  MOD_RES (5)..(6): Xaa is C or S
IPKAXXVPTELNAISMLYF

SEQ ID NO: 10036 - protein, 18 aa, Artificial Sequence
  Cyclic GFR-binding peptide
  MOD_RES (4)..(5): Xaa is C or S
PKPXXAPTKLEPISVLYL

SEQ ID NO: 10037 - protein, 14 aa, Artificial Sequence
  Cyclic GFR-binding peptide
  MOD_RES (1)..(1): Xaa is C or S
XVPTKLSATSVLYY

SEQ ID NO: 10038 - protein, 20 aa, Artificial Sequence
  Cyclic GFR-binding peptide
  MOD_RES (6)..(7): Xaa is C or S
SIPKAXXVPTELSPISMLYK

SEQ ID NO: 10039 - protein, 20 aa, Artificial Sequence
  Cyclic GFR-binding peptide
  MOD_RES (6)..(7): Xaa is C or S
SIPKAXXVPTELNAISMLYF

SEQ ID NO: 10040 - protein, 18 aa, Artificial Sequence
  Cyclic GFR-binding peptide
  MOD_RES (4)..(5): Xaa is C or S
GKAXXVPTKLEPISVLYL

SEQ ID NO: 10041 - protein, 17 aa, Artificial Sequence
  Cyclic GFR-binding peptide
  MOD_RES (3)..(4): Xaa is C or S
PTXXVPTRLEPISILYL

SEQ ID NO: 10042 - protein, 19 aa, Artificial Sequence
  Cyclic GFR-binding peptide
  MOD_RES (5)..(6): Xaa is C or S
SASPXXVPQDLSPISILYK

SEQ ID NO: 10043 - protein, 20 aa, Artificial Sequence
  Cyclic GFR-binding peptide
  MOD_RES (6)..(7): Xaa is C or S
KASKAXXVPTKLNAISILYF

SEQ ID NO: 10044 - protein, 19 aa, Artificial Sequence
  Cyclic GFR-binding peptide
SQDLSPISILYKIGKTPKI

SEQ ID NO: 10045 - protein, 18 aa, Artificial Sequence
  Cyclic GFR-binding peptide
QDLNAISILYFVGRTPKV

SEQ ID NO: 10046 - protein, 20 aa, Artificial Sequence
  Cyclic GFR-binding peptide
  MOD_RES (6)..(7): Xaa is C or S
YVPKPXXAPTKLSPISVLYK

SEQ ID NO: 10047 - protein, 16 aa, Artificial Sequence
  Cyclic GFR-binding peptide
LNAISVLYFDSSNNVI

SEQ ID NO: 10048 - protein, 16 aa, Artificial Sequence
  Cyclic GFR-binding peptide
  MOD_RES (2)..(3): Xaa is C or S
AXXAPTKLNAISVLYF

SEQ ID NO: 10049 - protein, 16 aa, Artificial Sequence
  Cyclic GFR-binding peptide
  MOD_RES (2)..(3): Xaa is C or S
AXXVPTKLNAISILYF

SEQ ID NO: 10050 - protein, 16 aa, Artificial Sequence
  Cyclic GFR-binding peptide
  MOD_RES (3)..(3): Xaa is C or S
PTXAPTKLSATSVLYY

SEQ ID NO: 10051 - protein, 19 aa, Artificial Sequence
  Cyclic GFR-binding peptide
PQDLNAISILYFVGRTPKV

SEQ ID NO: 10052 - protein, 13 aa, Artificial Sequence
  Cyclic GFR-binding peptide
TPTKMSPISMLYK

SEQ ID NO: 10053 - protein, 15 aa, Artificial Sequence
  Cyclic GFR-binding peptide
EPISMLYLDEYDKVV

SEQ ID NO: 10054 - protein, 15 aa, Artificial Sequence
  Cyclic GFR-binding peptide
  MOD_RES (1)..(2): Xaa is C or S
XXVPTRLSPINILYF

SEQ ID NO: 10055 - protein, 15 aa, Artificial Sequence
  Cyclic GFR-binding peptide
  MOD_RES (1)..(2): Xaa is C or S
XXVPTKLNAISVLYF

SEQ ID NO: 10056 - protein, 19 aa, Artificial Sequence
  Cyclic GFR-binding peptide
  MOD_RES (5)..(6): Xaa is C or S
VGKAXXVPTKLSATSVLYY

SEQ ID NO: 10057 - protein, 19 aa, Artificial Sequence
  Cyclic GFR-binding peptide
PARLSATSILYYDAANNVV

SEQ ID NO: 10058 - protein, 13 aa, Artificial Sequence
  Cyclic GFR-binding peptide
TPTKMSATSMLYY

SEQ ID NO: 10059 - protein, 17 aa, Artificial Sequence
  Cyclic GFR-binding peptide
  MOD_RES (3)..(4): Xaa is C or S
ASXXVPARLNAISILYF

SEQ ID NO: 10060 - protein, 20 aa, Artificial Sequence
  Cyclic GFR-binding peptide
  MOD_RES (6)..(7): Xaa is C or S
ASASPXXVPQDLSATSILYY

SEQ ID NO: 10061 - protein, 15 aa, Artificial Sequence
  Cyclic GFR-binding peptide
  MOD_RES (1)..(2): Xaa is C or S
XXVPTKLSATSVLYY

SEQ ID NO: 10062 - protein, 19 aa, Artificial Sequence
  Cyclic GFR-binding peptide
  MOD_RES (5)..(6): Xaa is C or S
VPKPXXAPTQLSPISVLYK

SEQ ID NO: 10063 - protein, 19 aa, Artificial Sequence
  Cyclic GFR-binding peptide
PARLSPINILYFDAANNVV

SEQ ID NO: 10064 - protein, 19 aa, Artificial Sequence
  Cyclic GFR-binding peptide
  MOD_RES (5)..(6): Xaa is C or S
ASKAXXVPTKLNAISILYF

SEQ ID NO: 10065 - protein, 18 aa, Artificial Sequence
  Cyclic GFR-binding peptide
  MOD_RES (4)..(5): Xaa is C or S
AAPXXVPQALNAISILYF

SEQ ID NO: 10066 - protein, 16 aa, Artificial Sequence
  Cyclic GFR-binding peptide
  MOD_RES (3)..(3): Xaa is C or S
PTXAPTKLSPISVLYK

SEQ ID NO: 10067 - protein, 18 aa, Artificial Sequence
  Cyclic GFR-binding peptide
TQLSPISVLYKDDSSNVI

SEQ ID NO: 10068 - protein, 20 aa, Artificial Sequence
  Cyclic GFR-binding peptide
  MOD_RES (6)..(7): Xaa is C or S
STPPTXXVPTRLEPISILYL

SEQ ID NO: 10069 - protein, 20 aa, Artificial Sequence
  Cyclic GFR-binding peptide
  MOD_RES (6)..(7): Xaa is C or S
YVPKPXXAPTKLSPINVLYF

SEQ ID NO: 10070 - protein, 15 aa, Artificial Sequence
  Cyclic GFR-binding peptide
  MOD_RES (1)..(2): Xaa is C or S
XXVSQDLNAISILYF

SEQ ID NO: 10071 - protein, 27 aa, Artificial Sequence
  Cyclic GFR-binding peptide
  MOD_RES (6)..(7): Xaa is C or S
KIPKAXXVPTELSATSMLYYDENEKVV

SEQ ID NO: 10072 - protein, 19 aa, Artificial Sequence
  Cyclic GFR-binding peptide
PTELSATSMLYYDENEKVV

SEQ ID NO: 10073 - protein, 19 aa, Artificial Sequence
  Cyclic GFR-binding peptide
  MOD_RES (5)..(6): Xaa is C or S
VPKPXXAPTKLSPISVLYK

SEQ ID NO: 10074 - protein, 27 aa, Artificial Sequence
  Cyclic GFR-binding peptide
  MOD_RES (6)..(7): Xaa is C or S
KVGKAXXVPTKLEPISVLYLDDMGVPT

SEQ ID NO: 10075 - protein, 13 aa, Artificial Sequence
  Cyclic GFR-binding peptide
VSQDLSPINILYF

SEQ ID NO: 10076 - protein, 27 aa, Artificial Sequence
  Cyclic GFR-binding peptide
  MOD_RES (6)..(7): Xaa is C or S
AAPASXXVPARLNAISILYFDAANNVV

SEQ ID NO: 10077 - protein, 13 aa, Artificial Sequence
  Cyclic GFR-binding peptide
VPQDLSATSILYY

SEQ ID NO: 10078 - protein, 17 aa, Artificial Sequence
  Cyclic GFR-binding peptide
  MOD_RES (3)..(4): Xaa is C or S
GPXXTPTKMEPISMLYL

SEQ ID NO: 10079 - protein, 19 aa, Artificial Sequence
  Cyclic GFR-binding peptide
PVKTEPISMLYLDNGRVLL

SEQ ID NO: 10080 - protein, 20 aa, Artificial Sequence
  Cyclic GFR-binding peptide
  MOD_RES (6)..(7): Xaa is C or S
ASASPXXVSQDLNAISILYF

SEQ ID NO: 10081 - protein, 19 aa, Artificial Sequence
  Cyclic GFR-binding peptide
  MOD_RES (5)..(6): Xaa is C or S
VPSTXXAPVKTNAISMLYF

SEQ ID NO: 10082 - protein, 18 aa, Artificial Sequence
  Cyclic GFR-binding peptide
  MOD_RES (4)..(5): Xaa is C or S
AGPXXTPTKMSATSMLYY

SEQ ID NO: 10083 - protein, 18 aa, Artificial Sequence
  Cyclic GFR-binding peptide
VKTSPINMLYFDNGRVLL

SEQ ID NO: 10084 - protein, 17 aa, Artificial Sequence
  Cyclic GFR-binding peptide
DLSATSILYYVGRTPKV

SEQ ID NO: 10085 - protein, 19 aa, Artificial Sequence
  Cyclic GFR-binding peptide
  MOD_RES (5)..(6): Xaa is C or S
VPSTXXAPVKTSPISMLYK

SEQ ID NO: 10086 - protein, 15 aa, Artificial Sequence
  Cyclic GFR-binding peptide
  MOD_RES (1)..(2): Xaa is C or S
XXVPQALEPISILYL

SEQ ID NO: 10087 - protein, 18 aa, Artificial Sequence
  Cyclic GFR-binding peptide
  MOD_RES (4)..(5): Xaa is C or S
ASPXXVPQDLNAISILYF

SEQ ID NO: 10088 - protein, 20 aa, Artificial Sequence
  Cyclic GFR-binding peptide
  MOD_RES (6)..(7): Xaa is C or S
ASASPXXVSQDLSPISILYK

SEQ ID NO: 10089 - protein, 15 aa, Artificial Sequence
  Cyclic GFR-binding peptide
  MOD_RES (1)..(2): Xaa is C or S
XXVPTELSATSMLYY

SEQ ID NO: 10090 - protein, 18 aa, Artificial Sequence
  Cyclic GFR-binding peptide
TKMNAISMLYFNDKQQII

SEQ ID NO: 10091 - protein, 18 aa, Artificial Sequence
  Cyclic GFR-binding peptide
TKLSPISVLYKDDSSNVI

SEQ ID NO: 10092 - protein, 20 aa, Artificial Sequence
  Cyclic GFR-binding peptide
  MOD_RES (6)..(7): Xaa is C or S
RVPSTXXAPVKTSPINMLYF

SEQ ID NO: 10093 - protein, 13 aa, Artificial Sequence
  Cyclic GFR-binding peptide
VSQDLSPISILYK

SEQ ID NO: 10094 - protein, 16 aa, Artificial Sequence
  Cyclic GFR-binding peptide
  MOD_RES (2)..(3): Xaa is C or S
PXXVPQDLNAISILYF

SEQ ID NO: 10095 - protein, 27 aa, Artificial Sequence
  Cyclic GFR-binding peptide
  MOD_RES (6)..(7): Xaa is C or S
RVPSTXXAPVKTSPISMLYKDNGRVLL

SEQ ID NO: 10096 - protein, 14 aa, Artificial Sequence
  Cyclic GFR-binding peptide
  MOD_RES (1)..(1): Xaa is C or S
XAPTQLSATSVLYY

SEQ ID NO: 10097 - protein, 16 aa, Artificial Sequence
  Cyclic GFR-binding peptide
  MOD_RES (2)..(3): Xaa is C or S
SXXVPARLSATSILYY

SEQ ID NO: 10098 - protein, 18 aa, Artificial Sequence
  Cyclic GFR-binding peptide
  MOD_RES (4)..(5): Xaa is C or S
PPTXXVPTRLNAISILYF

SEQ ID NO: 10099 - protein, 16 aa, Artificial Sequence
  Cyclic GFR-binding peptide
  MOD_RES (2)..(3): Xaa is C or S
PXXTPTKMNAISMLYF

SEQ ID NO: 10100 - protein, 16 aa, Artificial Sequence
  Cyclic GFR-binding peptide
LSPISMLYKDEYDKVV

SEQ ID NO: 10101 - protein, 19 aa, Artificial Sequence
  Cyclic GFR-binding peptide
  MOD_RES (5)..(6): Xaa is C or S
IPEPXXVPEKMNAISILYF

SEQ ID NO: 10102 - protein, 18 aa, Artificial Sequence
  Cyclic GFR-binding peptide
QDLSPISILYKIGKTPKI

SEQ ID NO: 10103 - protein, 16 aa, Artificial Sequence
  Cyclic GFR-binding peptide
  MOD_RES (2)..(3): Xaa is C or S
PXXAPTQLSPISVLYK

SEQ ID NO: 10104 - protein, 18 aa, Artificial Sequence
  Cyclic GFR-binding peptide
  MOD_RES (4)..(5): Xaa is C or S
AAPXXVPQALEPISILYL

SEQ ID NO: 10105 - protein, 15 aa, Artificial Sequence
  Cyclic GFR-binding peptide
NAISVLYFDDMGVPT

SEQ ID NO: 10106 - protein, 27 aa, Artificial Sequence
  Cyclic GFR-binding peptide
  MOD_RES (6)..(7): Xaa is C or S
AVPKAXXAPTKLSPINVLYFDSSNNVI

SEQ ID NO: 10107 - protein, 20 aa, Artificial Sequence
  Cyclic GFR-binding peptide
  MOD_RES (6)..(7): Xaa is C or S
HVPKPXXAPTKLEPISVLYL

SEQ ID NO: 10108 - protein, 27 aa, Artificial Sequence
  Cyclic GFR-binding peptide
  MOD_RES (6)..(7): Xaa is C or S
GIPEPXXVPEKMNAISILYFDENKNVV

SEQ ID NO: 10109 - protein, 15 aa, Artificial Sequence
  Cyclic GFR-binding peptide
  MOD_RES (1)..(2): Xaa is C or S
XXVPTKLSPISILYK

SEQ ID NO: 10110 - protein, 19 aa, Artificial Sequence
  Cyclic GFR-binding peptide
SQDLSPINILYFIGKTPKI

SEQ ID NO: 10111 - protein, 18 aa, Artificial Sequence
  Cyclic GFR-binding peptide
TELNAISMLYFDENEKVV

SEQ ID NO: 10112 - protein, 18 aa, Artificial Sequence
  Cyclic GFR-binding peptide
  MOD_RES (4)..(5): Xaa is C or S
PEPXXVPEKMSPISILYK

SEQ ID NO: 10113 - protein, 14 aa, Artificial Sequence
  Cyclic GFR-binding peptide
  MOD_RES (1)..(1): Xaa is C or S
XVPTKLSATSILYY

SEQ ID NO: 10114 - protein, 17 aa, Artificial Sequence
  Cyclic GFR-binding peptide
KLSATSVLYYDDMGVPT

SEQ ID NO: 10115 - protein, 27 aa, Artificial Sequence
  Cyclic GFR-binding peptide
  MOD_RES (6)..(7): Xaa is C or S
AAPASXXVPARLSATSILYYDAANNVV

SEQ ID NO: 10116 - protein, 17 aa, Artificial Sequence
  Cyclic GFR-binding peptide
  MOD_RES (3)..(4): Xaa is C or S
SPXXVPQDLEPISILYL

SEQ ID NO: 10117 - protein, 20 aa, Artificial Sequence
  Cyclic GFR-binding peptide
  MOD_RES (6)..(7): Xaa is C or S
AAPASXXVPARLSPINILYF

SEQ ID NO: 10118 - protein, 19 aa, Artificial Sequence
  Cyclic GFR-binding peptide
SQDLNAISILYFIGKTPKI

SEQ ID NO: 10119 - protein, 16 aa, Artificial Sequence
  Cyclic GFR-binding peptide
LEPISILYLVGRKPKV

SEQ ID NO: 10120 - protein, 13 aa, Artificial Sequence
  Cyclic GFR-binding peptide
VPTKLSPINVLYF

SEQ ID NO: 10121 - protein, 18 aa, Artificial Sequence
  Cyclic GFR-binding peptide
TELSPINMLYFDENEKVV

SEQ ID NO: 10122 - protein, 15 aa, Artificial Sequence
  Cyclic GFR-binding peptide
SPINVLYFDDMGVPT

SEQ ID NO: 10123 - protein, 13 aa, Artificial Sequence
  Cyclic GFR-binding peptide
VPEKMSPINILYF

SEQ ID NO: 10124 - protein, 27 aa, Artificial Sequence
  Cyclic GFR-binding peptide
  MOD_RES (6)..(7): Xaa is C or S
HVPKPXXAPTKLSPISVLYKDDSSNVI

SEQ ID NO: 10125 - protein, 20 aa, Artificial Sequence
  Cyclic GFR-binding peptide
  MOD_RES (7)..(7): Xaa is C or S
HVTKPTXAPTKLSATSVLYY

SEQ ID NO: 10126 - protein, 15 aa, Artificial Sequence
  Cyclic GFR-binding peptide
EPISMLYLDNGRVLL

SEQ ID NO: 10127 - protein, 27 aa, Artificial Sequence
  Cyclic GFR-binding peptide
  MOD_RES (6)..(7): Xaa is C or S
TVPKPXXAPTQLEPISVLYLDDSSNVI

SEQ ID NO: 10128 - protein, 14 aa, Artificial Sequence
  Cyclic GFR-binding peptide
  MOD_RES (1)..(1): Xaa is C or S
XVPEKMEPISILYL

SEQ ID NO: 10129 - protein, 17 aa, Artificial Sequence
  Cyclic GFR-binding peptide
  MOD_RES (4)..(4): Xaa is C or S
KPTXAPTKLSPINVLYF

SEQ ID NO: 10130 - protein, 14 aa, Artificial Sequence
  Cyclic GFR-binding peptide
  MOD_RES (1)..(1): Xaa is C or S
XVPTELEPISMLYL

SEQ ID NO: 10131 - protein, 16 aa, Artificial Sequence
  Cyclic GFR-binding peptide
  MOD_RES (2)..(3): Xaa is C or S
PXXVPQALNAISILYF

SEQ ID NO: 10132 - protein, 18 aa, Artificial Sequence
  Cyclic GFR-binding peptide
ARLSPISILYKDAANNVV

SEQ ID NO: 10133 - protein, 17 aa, Artificial Sequence
  Cyclic GFR-binding peptide
ELEPISMLYLDEYDKVV

SEQ ID NO: 10134 - protein, 16 aa, Artificial Sequence
  Cyclic GFR-binding peptide
  MOD_RES (2)..(3): Xaa is C or S
PXXVSQDLEPISILYL

SEQ ID NO: 10135 - protein, 17 aa, Artificial Sequence
  Cyclic GFR-binding peptide
  MOD_RES (3)..(4): Xaa is C or S
EPXXVPEKMSATSILYY

SEQ ID NO: 10136 - protein, 14 aa, Artificial Sequence
  Cyclic GFR-binding peptide
  MOD_RES (1)..(1): Xaa is C or S
XAPTKLSPISVLYK

SEQ ID NO: 10137 - protein, 14 aa, Artificial Sequence
  Cyclic GFR-binding peptide
  MOD_RES (1)..(1): Xaa is C or S
XVPEKMNAISILYF

SEQ ID NO: 10138 - protein, 19 aa, Artificial Sequence
  Cyclic GFR-binding peptide
  MOD_RES (5)..(6): Xaa is C or S
TPPTXXVPTRLNAISILYF

SEQ ID NO: 10139 - protein, 16 aa, Artificial Sequence
  Cyclic GFR-binding peptide
  MOD_RES (2)..(3): Xaa is C or S
PXXVPQALEPISILYL

SEQ ID NO: 10140 - protein, 27 aa, Artificial Sequence
  Cyclic GFR-binding peptide
  MOD_RES (6)..(7): Xaa is C or S
ASASPXXVPQDLSATSILYYVGRTPKV

SEQ ID NO: 10141 - protein, 15 aa, Artificial Sequence
  Cyclic GFR-binding peptide
SPISILYKVGRKPKV

SEQ ID NO: 10142 - protein, 20 aa, Artificial Sequence
  Cyclic GFR-binding peptide
  MOD_RES (6)..(7): Xaa is C or S
ASASPXXVPQDLEPISILYL

SEQ ID NO: 10143 - protein, 17 aa, Artificial Sequence
  Cyclic GFR-binding peptide
DLSPINILYFVGRTPKV

SEQ ID NO: 10144 - protein, 19 aa, Artificial Sequence
  Cyclic GFR-binding peptide
PTKMSATSMLYYNDKQQII

SEQ ID NO: 10145 - protein, 17 aa, Artificial Sequence
  Cyclic GFR-binding peptide
  MOD_RES (3)..(4): Xaa is C or S
GPXXTPTKMNAISMLYF

SEQ ID NO: 10146 - protein, 17 aa, Artificial Sequence
  Cyclic GFR-binding peptide
  MOD_RES (3)..(4): Xaa is C or S
KAXXVPTKLSATSILYY

SEQ ID NO: 10147 - protein, 13 aa, Artificial Sequence
  Cyclic GFR-binding peptide
APVKTSPINMLYF

SEQ ID NO: 10148 - protein, 18 aa, Artificial Sequence
  Cyclic GFR-binding peptide
  MOD_RES (4)..(5): Xaa is C or S
ASPXXVSQDLSATSILYY

SEQ ID NO: 10149 - protein, 18 aa, Artificial Sequence
  Cyclic GFR-binding peptide
EKMSATSILYYDENKNVV

SEQ ID NO: 10150 - protein, 14 aa, Artificial Sequence
  Cyclic GFR-binding peptide
  MOD_RES (1)..(1): Xaa is C or S
XVPTKLEPISVLYL

SEQ ID NO: 10151 - protein, 20 aa, Artificial Sequence
  Cyclic GFR-binding peptide
  MOD_RES (6)..(7): Xaa is C or S
STPPTXXVPTRLNAISILYF

SEQ ID NO: 10152 - protein, 19 aa, Artificial Sequence
  Cyclic GFR-binding peptide
PTKLSPISVLYKDSSNNVI

SEQ ID NO: 10153 - protein, 19 aa, Artificial Sequence
  Cyclic GFR-binding peptide
PTELSPISMLYKDEYDKVV

SEQ ID NO: 10154 - protein, 27 aa, Artificial Sequence
  Cyclic GFR-binding peptide
  MOD_RES (6)..(7): Xaa is C or S
GIPEPXXVPEKMSPINILYFDENKNVV

SEQ ID NO: 10155 - protein, 18 aa, Artificial Sequence
  Cyclic GFR-binding peptide
  MOD_RES (4)..(5): Xaa is C or S
PKAXXVPTELSATSMLYY

SEQ ID NO: 10156 - protein, 16 aa, Artificial Sequence
  Cyclic GFR-binding peptide
  MOD_RES (2)..(3): Xaa is C or S
AXXAPTKLEPISVLYL

SEQ ID NO: 10157 - protein, 13 aa, Artificial Sequence
  Cyclic GFR-binding peptide
VPTRLNAISILYF

SEQ ID NO: 10158 - protein, 17 aa, Artificial Sequence
  Cyclic GFR-binding peptide
  MOD_RES (3)..(4): Xaa is C or S
KAXXAPTKLSPISVLYK

SEQ ID NO: 10159 - protein, 13 aa, Artificial Sequence
  Cyclic GFR-binding peptide
VPARLSATSILYY

SEQ ID NO: 10160 - protein, 19 aa, Artificial Sequence
  Cyclic GFR-binding peptide
  MOD_RES (5)..(6): Xaa is C or S
IPEPXXVPEKMEPISILYL

SEQ ID NO: 10161 - protein, 13 aa, Artificial Sequence
  Cyclic GFR-binding peptide
VPQALSPISILYK

SEQ ID NO: 10162 - protein, 15 aa, Artificial Sequence
  Cyclic GFR-binding peptide
  MOD_RES (1)..(2): Xaa is C or S
XXAPTQLSPISVLYK

SEQ ID NO: 10163 - protein, 17 aa, Artificial Sequence
  Cyclic GFR-binding peptide
RLEPISILYLDAANNVV

SEQ ID NO: 10164 - protein, 15 aa, Artificial Sequence
  Cyclic GFR-binding peptide
  MOD_RES (1)..(2): Xaa is C or S
XXVPTELNAISMLYF

SEQ ID NO: 10165 - protein, 16 aa, Artificial Sequence
  Cyclic GFR-binding peptide
LNAISILYFDKGVVTY

SEQ ID NO: 10166 - protein, 16 aa, Artificial Sequence
  Cyclic GFR-binding peptide
LSATSMLYYDENEKVV

SEQ ID NO: 10167 - protein, 27 aa, Artificial Sequence
  Cyclic GFR-binding peptide
  MOD_RES (6)..(7): Xaa is C or S
YVPKPXXAPTKLSATSVLYYDDSSNVI

SEQ ID NO: 10168 - protein, 15 aa, Artificial Sequence
  Cyclic GFR-binding peptide
  MOD_RES (1)..(2): Xaa is C or S
XXVSQDLEPISILYL

SEQ ID NO: 10169 - protein, 18 aa, Artificial Sequence
  Cyclic GFR-binding peptide
  MOD_RES (4)..(5): Xaa is C or S
PASXXVPARLEPISILYL

SEQ ID NO: 10170 - protein, 19 aa, Artificial Sequence
  Cyclic GFR-binding peptide
  MOD_RES (6)..(6): Xaa is C or S
VTKPTXAPTKLSPISVLYK

SEQ ID NO: 10171 - protein, 16 aa, Artificial Sequence
  Cyclic GFR-binding peptide
  MOD_RES (2)..(3): Xaa is C or S
TXXVPTRLSPISILYK

SEQ ID NO: 10172 - protein, 15 aa, Artificial Sequence
  Cyclic GFR-binding peptide
  MOD_RES (1)..(2): Xaa is C or S
XXVPEKMSATSILYY

SEQ ID NO: 10173 - protein, 18 aa, Artificial Sequence
  Cyclic GFR-binding peptide
  MOD_RES (4)..(5): Xaa is C or S
PKAXXAPTKLSPISVLYK

SEQ ID NO: 10174 - protein, 19 aa, Artificial Sequence
  Cyclic GFR-binding peptide
PQDLSPINILYFVGRTPKV

SEQ ID NO: 10175 - protein, 16 aa, Artificial Sequence
  Cyclic GFR-binding peptide
MNAISILYFDENKNVV

SEQ ID NO: 10176 - protein, 19 aa, Artificial Sequence
  Cyclic GFR-binding peptide
PTELSPINMLYFDEYDKVV

SEQ ID NO: 10177 - protein, 13 aa, Artificial Sequence
  Cyclic GFR-binding peptide
VPTELSPINMLYF

SEQ ID NO: 10178 - protein, 19 aa, Artificial Sequence
  Cyclic GFR-binding peptide
  MOD_RES (5)..(6): Xaa is C or S
VPKPXXAPTKLSATSVLYY

SEQ ID NO: 10179 - protein, 19 aa, Artificial Sequence
  Cyclic GFR-binding peptide
  MOD_RES (5)..(6): Xaa is C or S
TPPTXXVPTRLEPISILYL

SEQ ID NO: 10180 - protein, 20 aa, Artificial Sequence
  Cyclic GFR-binding peptide
  MOD_RES (6)..(7): Xaa is C or S
KIPKAXXVPTELSPISMLYK

SEQ ID NO: 10181 - protein, 18 aa, Artificial Sequence
  Cyclic GFR-binding peptide
ARLNAISILYFDAANNVV

SEQ ID NO: 10182 - protein, 18 aa, Artificial Sequence
  Cyclic GFR-binding peptide
  MOD_RES (4)..(5): Xaa is C or S
SKAXXVPTKLNAISILYF

SEQ ID NO: 10183 - protein, 18 aa, Artificial Sequence
  Cyclic GFR-binding peptide
  MOD_RES (4)..(5): Xaa is C or S
AGPXXTPTKMSPISMLYK

SEQ ID NO: 10184 - protein, 20 aa, Artificial Sequence
  Cyclic GFR-binding peptide
  MOD_RES (6)..(7): Xaa is C or S
ASASPXXVSQDLSATSILYY

SEQ ID NO: 10185 - protein, 14 aa, Artificial Sequence
  Cyclic GFR-binding peptide
  MOD_RES (1)..(1): Xaa is C or S
XAPVKTEPISMLYL

SEQ ID NO: 10186 - protein, 18 aa, Artificial Sequence
  Cyclic GFR-binding peptide
TKLEPISVLYLDDMGVPT

SEQ ID NO: 10187 - protein, 15 aa, Artificial Sequence
  Cyclic GFR-binding peptide
EPISILYLDAANNVV

SEQ ID NO: 10188 - protein, 16 aa, Artificial Sequence
  Cyclic GFR-binding peptide
LSATSVLYYDDSSNVI

SEQ ID NO: 10189 - protein, 20 aa, Artificial Sequence
  Cyclic GFR-binding peptide
  MOD_RES (6)..(7): Xaa is C or S
KIPKAXXVPTELSATSMLYY

SEQ ID NO: 10190 - protein, 18 aa, Artificial Sequence
  Cyclic GFR-binding peptide
  MOD_RES (4)..(5): Xaa is C or S
PPTXXVPTRLEPISILYL

SEQ ID NO: 10191 - protein, 16 aa, Artificial Sequence
  Cyclic GFR-binding peptide
  MOD_RES (2)..(3): Xaa is C or S
PXXVSQDLNAISILYF

SEQ ID NO: 10192 - protein, 15 aa, Artificial Sequence
  Cyclic GFR-binding peptide
  MOD_RES (1)..(2): Xaa is C or S
XXAPVKTEPISMLYL

SEQ ID NO: 10193 - protein, 19 aa, Artificial Sequence
  Cyclic GFR-binding peptide
PTKLSPISILYKDKGVVTY

SEQ ID NO: 10194 - protein, 14 aa, Artificial Sequence
  Cyclic GFR-binding peptide
  MOD_RES (1)..(1): Xaa is C or S
XVPTELNAISMLYF

SEQ ID NO: 10195 - protein, 16 aa, Artificial Sequence
  Cyclic GFR-binding peptide
  MOD_RES (2)..(3): Xaa is C or S
PXXVPEKMSATSILYY

SEQ ID NO: 10196 - protein, 18 aa, Artificial Sequence
  Cyclic GFR-binding peptide
TRLSPINILYFDSANNVV

SEQ ID NO: 10197 - protein, 20 aa, Artificial Sequence
  Cyclic GFR-binding peptide
  MOD_RES (6)..(7): Xaa is C or S
ASASPXXVPQDLNAISILYF

SEQ ID NO: 10198 - protein, 19 aa, Artificial Sequence
  Cyclic GFR-binding peptide
PTRLSATSILYYDSANNVV

SEQ ID NO: 10199 - protein, 15 aa, Artificial Sequence
  Cyclic GFR-binding peptide
  MOD_RES (1)..(2): Xaa is C or S
XXVPTKLSATSILYY

SEQ ID NO: 10200 - protein, 27 aa, Artificial Sequence
  Cyclic GFR-binding peptide
  MOD_RES (6)..(7): Xaa is C or S
STPPTXXVPTRLSATSILYYDSANNVV

SEQ ID NO: 10201 - protein, 15 aa, Artificial Sequence
  Cyclic GFR-binding peptide
SATSILYYDKGVVTY

SEQ ID NO: 10202 - protein, 14 aa, Artificial Sequence
  Cyclic GFR-binding peptide
  MOD_RES (1)..(1): Xaa is C or S
XVPTKLNAISVLYF

SEQ ID NO: 10203 - protein, 16 aa, Artificial Sequence
  Cyclic GFR-binding peptide
LSPISVLYKDSSNNVI

SEQ ID NO: 10204 - protein, 19 aa, Artificial Sequence
  Cyclic GFR-binding peptide
  MOD_RES (5)..(6): Xaa is C or S
IPKAXXVPTELEPISMLYL

SEQ ID NO: 10205 - protein, 15 aa, Artificial Sequence
  Cyclic GFR-binding peptide
  MOD_RES (1)..(2): Xaa is C or S
XXAPTQLSATSVLYY

SEQ ID NO: 10206 - protein, 17 aa, Artificial Sequence
  Cyclic GFR-binding peptide
DLSATSILYYIGKTPKI

SEQ ID NO: 10207 - protein, 17 aa, Artificial Sequence
  Cyclic GFR-binding peptide
KTSATSMLYYDNGRVLL

SEQ ID NO: 10208 - protein, 17 aa, Artificial Sequence
  Cyclic GFR-binding peptide
KMEPISILYLDENKNVV

SEQ ID NO: 10209 - protein, 13 aa, Artificial Sequence
  Cyclic GFR-binding peptide
VPTRLEPISILYL

SEQ ID NO: 10210 - protein, 19 aa, Artificial Sequence
  Cyclic GFR-binding peptide
PTQLSATSVLYYDDSSNVI

SEQ ID NO: 10211 - protein, 15 aa, Artificial Sequence
  Cyclic GFR-binding peptide
SPISILYKIGKTPKI

SEQ ID NO: 10212 - protein, 19 aa, Artificial Sequence
  Cyclic GFR-binding peptide
PTKLSATSVLYYDDSSNVI

SEQ ID NO: 10213 - protein, 18 aa, Artificial Sequence
  Cyclic GFR-binding peptide
QDLNAISILYFIGKTPKI

SEQ ID NO: 10214 - protein, 20 aa, Artificial Sequence
  Cyclic GFR-binding peptide
  MOD_RES (7)..(7): Xaa is C or S
HVTKPTXAPTKLSPISVLYK

SEQ ID NO: 10215 - protein, 19 aa, Artificial Sequence
  Cyclic GFR-binding peptide
  MOD_RES (6)..(6): Xaa is C or S
VTKPTXAPTKLSATSVLYY

SEQ ID NO: 10216 - protein, 16 aa, Artificial Sequence
  Cyclic GFR-binding peptide
LSPINMLYFDEYDKVV

SEQ ID NO: 10217 - protein, 17 aa, Artificial Sequence
  Cyclic GFR-binding peptide
  MOD_RES (3)..(4): Xaa is C or S
PTXXVPTRLNAISILYF

SEQ ID NO: 10218 - protein, 16 aa, Artificial Sequence
  Cyclic GFR-binding peptide
  MOD_RES (2)..(3): Xaa is C or S
PXXTPTKMEPISMLYL

SEQ ID NO: 10219 - protein, 17 aa, Artificial Sequence
  Cyclic GFR-binding peptide
  MOD_RES (3)..(4): Xaa is C or S
KAXXVPTKLSPISILYK

SEQ ID NO: 10220 - protein, 20 aa, Artificial Sequence
  Cyclic GFR-binding peptide
  MOD_RES (6)..(7): Xaa is C or S
KASKAXXVPTKLSATSILYY

SEQ ID NO: 10221 - protein, 16 aa, Artificial Sequence
  Cyclic GFR-binding peptide
LSPISILYKDKGVVTY

SEQ ID NO: 10222 - protein, 18 aa, Artificial Sequence
  Cyclic GFR-binding peptide
TQLSPINVLYFDDSSNVI

SEQ ID NO: 10223 - protein, 18 aa, Artificial Sequence
  Cyclic GFR-binding peptide
TKLSPINVLYFDDSSNVI

SEQ ID NO: 10224 - protein, 27 aa, Artificial Sequence
  Cyclic GFR-binding peptide
  MOD_RES (6)..(7): Xaa is C or S
GSAGPXXTPTKMNAISMLYFNDKQQII

SEQ ID NO: 10225 - protein, 16 aa, Artificial Sequence
  Cyclic GFR-binding peptide
LSATSILYYDAANNVV

SEQ ID NO: 10226 - protein, 14 aa, Artificial Sequence
  Cyclic GFR-binding peptide
  MOD_RES (1)..(1): Xaa is C or S
XVPARLSPINILYF

SEQ ID NO: 10227 - protein, 27 aa, Artificial Sequence
  Cyclic GFR-binding peptide
  MOD_RES (6)..(7): Xaa is C or S
ASASPXXVSQDLSATSILYYIGKTPKI

SEQ ID NO: 10228 - protein, 18 aa, Artificial Sequence
  Cyclic GFR-binding peptide
  MOD_RES (4)..(5): Xaa is C or S
PEPXXVPEKMSATSILYY

SEQ ID NO: 10229 - protein, 17 aa, Artificial Sequence
  Cyclic GFR-binding peptide
  MOD_RES (3)..(4): Xaa is C or S
SPXXVSQDLNAISILYF

SEQ ID NO: 10230 - protein, 19 aa, Artificial Sequence
  Cyclic GFR-binding peptide
PTELNAISMLYFDEYDKVV

SEQ ID NO: 10231 - protein, 18 aa, Artificial Sequence
  Cyclic GFR-binding peptide
  MOD_RES (4)..(5): Xaa is C or S
PKAXXVPTELSPISMLYK

SEQ ID NO: 10232 - protein, 27 aa, Artificial Sequence
  Cyclic GFR-binding peptide
  MOD_RES (6)..(7): Xaa is C or S
KVGKAXXVPTKLNAISVLYFDDMGVPT

SEQ ID NO: 10233 - protein, 18 aa, Artificial Sequence
  Cyclic GFR-binding peptide
  MOD_RES (4)..(5): Xaa is C or S
ASPXXVSQDLSPISILYK

SEQ ID NO: 10234 - protein, 19 aa, Artificial Sequence
  Cyclic GFR-binding peptide
  MOD_RES (5)..(6): Xaa is C or S
SASPXXVSQDLSATSILYY

SEQ ID NO: 10235 - protein, 17 aa, Artificial Sequence
  Cyclic GFR-binding peptide
  MOD_RES (3)..(4): Xaa is C or S
STXXAPVKTEPISMLYL

SEQ ID NO: 10236 - protein, 19 aa, Artificial Sequence
  Cyclic GFR-binding peptide
  MOD_RES (5)..(6): Xaa is C or S
IPEPXXVPEKMSATSILYY

SEQ ID NO: 10237 - protein, 18 aa, Artificial Sequence
  Cyclic GFR-binding peptide
  MOD_RES (4)..(5): Xaa is C or S
PPTXXVPTRLSATSILYY

SEQ ID NO: 10238 - protein, 15 aa, Artificial Sequence
  Cyclic GFR-binding peptide
  MOD_RES (1)..(2): Xaa is C or S
XXAPTKLEPISVLYL

SEQ ID NO: 10239 - protein, 16 aa, Artificial Sequence
  Cyclic GFR-binding peptide
MNAISMLYFNDKQQII

SEQ ID NO: 10240 - protein, 17 aa, Artificial Sequence
  Cyclic GFR-binding peptide
DLSPINILYFIGKTPKI

SEQ ID NO: 10241 - protein, 15 aa, Artificial Sequence
  Cyclic GFR-binding peptide
EPISMLYLDENEKVV

SEQ ID NO: 10242 - protein, 17 aa, Artificial Sequence
  Cyclic GFR-binding peptide
  MOD_RES (3)..(4): Xaa is C or S
EPXXVPEKMEPISILYL

SEQ ID NO: 10243 - protein, 15 aa, Artificial Sequence
  Cyclic GFR-binding peptide
  MOD_RES (1)..(2): Xaa is C or S
XXAPVKTNAISMLYF

SEQ ID NO: 10244 - protein, 17 aa, Artificial Sequence
  Cyclic GFR-binding peptide
KTSPINMLYFDNGRVLL

SEQ ID NO: 10245 - protein, 18 aa, Artificial Sequence
  Cyclic GFR-binding peptide
QALSATSILYYVGRKPKV

SEQ ID NO: 10246 - protein, 16 aa, Artificial Sequence
  Cyclic GFR-binding peptide
LNAISVLYFDDMGVPT

SEQ ID NO: 10247 - protein, 27 aa, Artificial Sequence
  Cyclic GFR-binding peptide
  MOD_RES (6)..(7): Xaa is C or S
AAPASXXVPARLSPINILYFDAANNVV

SEQ ID NO: 10248 - protein, 19 aa, Artificial Sequence
  Cyclic GFR-binding peptide
  MOD_RES (5)..(6): Xaa is C or S
VPKPXXAPTKLEPISVLYL

SEQ ID NO: 10249 - protein, 17 aa, Artificial Sequence
  Cyclic GFR-binding peptide
  MOD_RES (3)..(4): Xaa is C or S
ASXXVPARLEPISILYL

SEQ ID NO: 10250 - protein, 27 aa, Artificial Sequence
  Cyclic GFR-binding peptide
  MOD_RES (6)..(7): Xaa is C or S
STPPTXXVPTRLSPINILYFDSANNVV

SEQ ID NO: 10251 - protein, 15 aa, Artificial Sequence
  Cyclic GFR-binding peptide
  MOD_RES (1)..(2): Xaa is C or S
XXAPVKTSPISMLYK

SEQ ID NO: 10252 - protein, 13 aa, Artificial Sequence
  Cyclic GFR-binding peptide
VPTKLSPINILYF

SEQ ID NO: 10253 - protein, 19 aa, Artificial Sequence
  Cyclic GFR-binding peptide
  MOD_RES (6)..(6): Xaa is C or S
VTKPTXAPTKLSPINVLYF

SEQ ID NO: 10254 - protein, 19 aa, Artificial Sequence
  Cyclic GFR-binding peptide
PQALSPINILYFVGRKPKV

SEQ ID NO: 10255 - protein, 17 aa, Artificial Sequence
  Cyclic GFR-binding peptide
ELSPISMLYKDENEKVV

SEQ ID NO: 10256 - protein, 19 aa, Artificial Sequence
  Cyclic GFR-binding peptide
  MOD_RES (5)..(6): Xaa is C or S
VGKAXXVPTKLEPISVLYL

SEQ ID NO: 10257 - protein, 13 aa, Artificial Sequence
  Cyclic GFR-binding peptide
VSQDLSATSILYY

SEQ ID NO: 10258 - protein, 14 aa, Artificial Sequence
  Cyclic GFR-binding peptide
  MOD_RES (1)..(1): Xaa is C or S
XVPTKLSPINVLYF

SEQ ID NO: 10259 - protein, 20 aa, Artificial Sequence
  Cyclic GFR-binding peptide
  MOD_RES (6)..(7): Xaa is C or S
TVPKPXXAPTQLSATSVLYY

SEQ ID NO: 10260 - protein, 16 aa, Artificial Sequence
  Cyclic GFR-binding peptide
  MOD_RES (2)..(3): Xaa is C or S
PXXVPQDLEPISILYL

SEQ ID NO: 10261 - protein, 20 aa, Artificial Sequence
  Cyclic GFR-binding peptide
  MOD_RES (6)..(7): Xaa is C or S
KIPKAXXVPTELSPINMLYF

SEQ ID NO: 10262 - protein, 14 aa, Artificial Sequence
  Cyclic GFR-binding peptide
  MOD_RES (1)..(1): Xaa is C or S
XVPTRLEPISILYL

SEQ ID NO: 10263 - protein, 27 aa, Artificial Sequence
  Cyclic GFR-binding peptide
  MOD_RES (7)..(7): Xaa is C or S
HVTKPTXAPTKLSPINVLYFDDSSNVI

SEQ ID NO: 10264 - protein, 17 aa, Artificial Sequence
  Cyclic GFR-binding peptide
KMSPISMLYKNDKQQII

SEQ ID NO: 10265 - protein, 17 aa, Artificial Sequence
  Cyclic GFR-binding peptide
RLEPISILYLDSANNVV

SEQ ID NO: 10266 - protein, 27 aa, Artificial Sequence
  Cyclic GFR-binding peptide
  MOD_RES (6)..(7): Xaa is C or S
KIPKAXXVPTELSPINMLYFDENEKVV

SEQ ID NO: 10267 - protein, 18 aa, Artificial Sequence
  Cyclic GFR-binding peptide
TKLNAISVLYFDSSNNVI

SEQ ID NO: 10268 - protein, 18 aa, Artificial Sequence
  Cyclic GFR-binding peptide
QDLSPINILYFVGRTPKV

SEQ ID NO: 10269 - protein, 16 aa, Artificial Sequence
  Cyclic GFR-binding peptide
LNAISMLYFDENEKVV

SEQ ID NO: 10270 - protein, 20 aa, Artificial Sequence
  Cyclic GFR-binding peptide
  MOD_RES (6)..(7): Xaa is C or S
ASASPXXVSQDLEPISILYL

SEQ ID NO: 10271 - protein, 16 aa, Artificial Sequence
  Cyclic GFR-binding peptide
LEPISILYLVGRTPKV

SEQ ID NO: 10272 - protein, 15 aa, Artificial Sequence
  Cyclic GFR-binding peptide
NAISILYFDAANNVV

SEQ ID NO: 10273 - protein, 18 aa, Artificial Sequence
  Cyclic GFR-binding peptide
  MOD_RES (4)..(5): Xaa is C or S
PKPXXAPTQLSPINVLYF

SEQ ID NO: 10274 - protein, 15 aa, Artificial Sequence
  Cyclic GFR-binding peptide
  MOD_RES (1)..(2): Xaa is C or S
XXVPEKMNAISILYF

SEQ ID NO: 10275 - protein, 13 aa, Artificial Sequence
  Cyclic GFR-binding peptide
VPARLNAISILYF

SEQ ID NO: 10276 - protein, 15 aa, Artificial Sequence
  Cyclic GFR-binding peptide
SPISMLYKDENEKVV

SEQ ID NO: 10277 - protein, 18 aa, Artificial Sequence
  Cyclic GFR-binding peptide
ARLSPINILYFDAANNVV

SEQ ID NO: 10278 - protein, 20 aa, Artificial Sequence
  Cyclic GFR-binding peptide
  MOD_RES (6)..(7): Xaa is C or S
SIPKAXXVPTELEPISMLYL

SEQ ID NO: 10279 - protein, 20 aa, Artificial Sequence
  Cyclic GFR-binding peptide
  MOD_RES (6)..(7): Xaa is C or S
AAPASXXVPARLEPISILYL

SEQ ID NO: 10280 - protein, 20 aa, Artificial Sequence
  Cyclic GFR-binding peptide
  MOD_RES (7)..(7): Xaa is C or S
HVTKPTXAPTKLEPISVLYL

SEQ ID NO: 10281 - protein, 15 aa, Artificial Sequence
  Cyclic GFR-binding peptide
  MOD_RES (1)..(2): Xaa is C or S
XXVPARLSPISILYK

SEQ ID NO: 10282 - protein, 15 aa, Artificial Sequence
  Cyclic GFR-binding peptide
SATSMLYYDEYDKVV

SEQ ID NO: 10283 - protein, 20 aa, Artificial Sequence
  Cyclic GFR-binding peptide
  MOD_RES (6)..(7): Xaa is C or S
HVPKPXXAPTKLSPINVLYF

SEQ ID NO: 10284 - protein, 16 aa, Artificial Sequence
  Cyclic GFR-binding peptide
LSPINVLYFDSSNNVI

SEQ ID NO: 10285 - protein, 19 aa, Artificial Sequence
  Cyclic GFR-binding peptide
  MOD_RES (5)..(6): Xaa is C or S
VPKPXXAPTQLSATSVLYY

SEQ ID NO: 10286 - protein, 15 aa, Artificial Sequence
  Cyclic GFR-binding peptide
SPINVLYFDSSNNVI

SEQ ID NO: 10287 - protein, 17 aa, Artificial Sequence
  Cyclic GFR-binding peptide
  MOD_RES (3)..(4): Xaa is C or S
GPXXTPTKMSPISMLYK

SEQ ID NO: 10288 - protein, 14 aa, Artificial Sequence
  Cyclic GFR-binding peptide
  MOD_RES (1)..(1): Xaa is C or S
XAPVKTSPISMLYK

SEQ ID NO: 10289 - protein, 15 aa, Artificial Sequence
  Cyclic GFR-binding peptide
  MOD_RES (2)..(2): Xaa is C or S
TXAPTKLEPISVLYL

SEQ ID NO: 10290 - protein, 20 aa, Artificial Sequence
  Cyclic GFR-binding peptide
  MOD_RES (6)..(7): Xaa is C or S
GIPEPXXVPEKMEPISILYL

SEQ ID NO: 10291 - protein, 19 aa, Artificial Sequence
  Cyclic GFR-binding peptide
  MOD_RES (5)..(6): Xaa is C or S
TPPTXXVPTRLSPISILYK

SEQ ID NO: 10292 - protein, 17 aa, Artificial Sequence
  Cyclic GFR-binding peptide
  MOD_RES (3)..(4): Xaa is C or S
KAXXVPTELSPINMLYF

SEQ ID NO: 10293 - protein, 17 aa, Artificial Sequence
  Cyclic GFR-binding peptide
  MOD_RES (3)..(4): Xaa is C or S
SPXXVPQDLNAISILYF

SEQ ID NO: 10294 - protein, 15 aa, Artificial Sequence
  Cyclic GFR-binding peptide
  MOD_RES (1)..(2): Xaa is C or S
XXVPTKLSPINILYF

SEQ ID NO: 10295 - protein, 19 aa, Artificial Sequence
  Cyclic GFR-binding peptide
PTKLEPISVLYLDDMGVPT

SEQ ID NO: 10296 - protein, 17 aa, Artificial Sequence
  Cyclic GFR-binding peptide
KMEPISMLYLNDKQQII

SEQ ID NO: 10297 - protein, 17 aa, Artificial Sequence
  Cyclic GFR-binding peptide
ALSPINILYFVGRKPKV

SEQ ID NO: 10298 - protein, 17 aa, Artificial Sequence
  Cyclic GFR-binding peptide
RLSPISILYKDSANNVV

SEQ ID NO: 10299 - protein, 20 aa, Artificial Sequence
  Cyclic GFR-binding peptide
  MOD_RES (6)..(7): Xaa is C or S
ASASPXXVSQDLSPINILYF

SEQ ID NO: 10300 - protein, 16 aa, Artificial Sequence
  Cyclic GFR-binding peptide
  MOD_RES (2)..(3): Xaa is C or S
PXXVPQDLSPINILYF

SEQ ID NO: 10301 - protein, 18 aa, Artificial Sequence
  Cyclic GFR-binding peptide
  MOD_RES (4)..(5): Xaa is C or S
PASXXVPARLNAISILYF

SEQ ID NO: 10302 - protein, 19 aa, Artificial Sequence
  Cyclic GFR-binding peptide
  MOD_RES (5)..(6): Xaa is C or S
APASXXVPARLSATSILYY

SEQ ID NO: 10303 - protein, 19 aa, Artificial Sequence
  Cyclic GFR-binding peptide
PTELEPISMLYLDENEKVV

SEQ ID NO: 10304 - protein, 27 aa, Artificial Sequence
  Cyclic GFR-binding peptide
  MOD_RES (6)..(7): Xaa is C or S
KVGKAXXVPTKLSATSVLYYDDMGVPT

SEQ ID NO: 10305 - protein, 14 aa, Artificial Sequence
  Cyclic GFR-binding peptide
  MOD_RES (1)..(1): Xaa is C or S
XAPVKTNAISMLYF

SEQ ID NO: 10306 - protein, 18 aa, Artificial Sequence
  Cyclic GFR-binding peptide
  MOD_RES (4)..(5): Xaa is C or S
PKAXXVPTELNAISMLYF

SEQ ID NO: 10307 - protein, 13 aa, Artificial Sequence
  Cyclic GFR-binding peptide
VPQALSATSILYY

SEQ ID NO: 10308 - protein, 13 aa, Artificial Sequence
  Cyclic GFR-binding peptide
VPTKLEPISVLYL

SEQ ID NO: 10309 - protein, 18 aa, Artificial Sequence
  Cyclic GFR-binding peptide
TELSPISMLYKDEYDKVV

SEQ ID NO: 10310 - protein, 15 aa, Artificial Sequence
  Cyclic GFR-binding peptide
SPISILYKDAANNVV

SEQ ID NO: 10311 - protein, 18 aa, Artificial Sequence
  Cyclic GFR-binding peptide
  MOD_RES (4)..(5): Xaa is C or S
AGPXXTPTKMEPISMLYL

SEQ ID NO: 10312 - protein, 13 aa, Artificial Sequence
  Cyclic GFR-binding peptide
VPEKMSPISILYK

SEQ ID NO: 10313 - protein, 13 aa, Artificial Sequence
  Cyclic GFR-binding peptide
VPARLSPISILYK

SEQ ID NO: 10314 - protein, 16 aa, Artificial Sequence
  Cyclic GFR-binding peptide
MSATSMLYYNDKQQII

SEQ ID NO: 10315 - protein, 15 aa, Artificial Sequence
  Cyclic GFR-binding peptide
  MOD_RES (1)..(2): Xaa is C or S
XXVPEKMSPISILYK

SEQ ID NO: 10316 - protein, 15 aa, Artificial Sequence
  Cyclic GFR-binding peptide
  MOD_RES (1)..(2): Xaa is C or S
XXVPTKLEPISVLYL

SEQ ID NO: 10317 - protein, 17 aa, Artificial Sequence
  Cyclic GFR-binding peptide
  MOD_RES (3)..(4): Xaa is C or S
APXXVPQALSPISILYK

SEQ ID NO: 10318 - protein, 17 aa, Artificial Sequence
  Cyclic GFR-binding peptide
KMNAISMLYFNDKQQII

SEQ ID NO: 10319 - protein, 13 aa, Artificial Sequence
  Cyclic GFR-binding peptide
VPEKMNAISILYF

SEQ ID NO: 10320 - protein, 18 aa, Artificial Sequence
  Cyclic GFR-binding peptide
  MOD_RES (4)..(5): Xaa is C or S
GKAXXVPTKLNAISVLYF

SEQ ID NO: 10321 - protein, 20 aa, Artificial Sequence
  Cyclic GFR-binding peptide
  MOD_RES (6)..(7): Xaa is C or S
STPPTXXVPTRLSATSILYY

SEQ ID NO: 10322 - protein, 15 aa, Artificial Sequence
  Cyclic GFR-binding peptide
  MOD_RES (1)..(2): Xaa is C or S
XXVPARLNAISILYF

SEQ ID NO: 10323 - protein, 15 aa, Artificial Sequence
  Cyclic GFR-binding peptide
  MOD_RES (1)..(2): Xaa is C or S
XXVPQALSATSILYY

SEQ ID NO: 10324 - protein, 17 aa, Artificial Sequence
  Cyclic GFR-binding peptide
  MOD_RES (3)..(4): Xaa is C or S
ASXXVPARLSPINILYF

SEQ ID NO: 10325 - protein, 17 aa, Artificial Sequence
  Cyclic GFR-binding peptide
KLSPINVLYFDSSNNVI

SEQ ID NO: 10326 - protein, 14 aa, Artificial Sequence
  Cyclic GFR-binding peptide
  MOD_RES (1)..(1): Xaa is C or S
XAPTKLSPINVLYF

SEQ ID NO: 10327 - protein, 17 aa, Artificial Sequence
  Cyclic GFR-binding peptide
  MOD_RES (3)..(4): Xaa is C or S
APXXVPQALNAISILYF

SEQ ID NO: 10328 - protein, 15 aa, Artificial Sequence
  Cyclic GFR-binding peptide
NAISILYFDENKNVV

SEQ ID NO: 10329 - protein, 15 aa, Artificial Sequence
  Cyclic GFR-binding peptide
SATSILYYDENKNVV

SEQ ID NO: 10330 - protein, 19 aa, Artificial Sequence
  Cyclic GFR-binding peptide
PEKMEPISILYLDENKNVV

SEQ ID NO: 10331 - protein, 20 aa, Artificial Sequence
  Cyclic GFR-binding peptide
  MOD_RES (6)..(7): Xaa is C or S
AVPKAXXAPTKLSPINVLYF

SEQ ID NO: 10332 - protein, 19 aa, Artificial Sequence
  Cyclic GFR-binding peptide
  MOD_RES (5)..(6): Xaa is C or S
VPKPXXAPTKLSPINVLYF

SEQ ID NO: 10333 - protein, 18 aa, Artificial Sequence
  Cyclic GFR-binding peptide
QDLSATSILYYVGRTPKV

SEQ ID NO: 10334 - protein, 19 aa, Artificial Sequence
  Cyclic GFR-binding peptide
PTKLNAISVLYFDSSNNVI

SEQ ID NO: 10335 - protein, 20 aa, Artificial Sequence
  Cyclic GFR-binding peptide
  MOD_RES (6)..(7): Xaa is C or S
GIPEPXXVPEKMSPINILYF

SEQ ID NO: 10336 - protein, 18 aa, Artificial Sequence
  Cyclic GFR-binding peptide
  MOD_RES (4)..(5): Xaa is C or S
ASPXXVPQDLSPISILYK

SEQ ID NO: 10337 - protein, 13 aa, Artificial Sequence
  Cyclic GFR-binding peptide
APTKLSPINVLYF

SEQ ID NO: 10338 - protein, 19 aa, Artificial Sequence
  Cyclic GFR-binding peptide
  MOD_RES (5)..(6): Xaa is C or S
VPSTXXAPVKTEPISMLYL

SEQ ID NO: 10339 - protein, 20 aa, Artificial Sequence
  Cyclic GFR-binding peptide
  MOD_RES (6)..(7): Xaa is C or S
RVPSTXXAPVKTSPISMLYK

SEQ ID NO: 10340 - protein, 16 aa, Artificial Sequence
  Cyclic GFR-binding peptide
  MOD_RES (2)..(3): Xaa is C or S
SXXVPARLSPINILYF

SEQ ID NO: 10341 - protein, 19 aa, Artificial Sequence
  Cyclic GFR-binding peptide
  MOD_RES (5)..(6): Xaa is C or S
SAAPXXVPQALSATSILYY

SEQ ID NO: 10342 - protein, 17 aa, Artificial Sequence
  Cyclic GFR-binding peptide
  MOD_RES (3)..(4): Xaa is C or S
KAXXAPTKLNAISVLYF

SEQ ID NO: 10343 - protein, 17 aa, Artificial Sequence
  Cyclic GFR-binding peptide
  MOD_RES (3)..(4): Xaa is C or S
SPXXVPQDLSPISILYK

SEQ ID NO: 10344 - protein, 17 aa, Artificial Sequence
  Cyclic GFR-binding peptide
ELSATSMLYYDEYDKVV

SEQ ID NO: 10345 - protein, 27 aa, Artificial Sequence
  Cyclic GFR-binding peptide
  MOD_RES (6)..(7): Xaa is C or S
SIPKAXXVPTELSPINMLYFDEYDKVV

SEQ ID NO: 10346 - protein, 19 aa, Artificial Sequence
  Cyclic GFR-binding peptide
  MOD_RES (5)..(6): Xaa is C or S
SASPXXVPQDLSATSILYY

SEQ ID NO: 10347 - protein, 16 aa, Artificial Sequence
  Cyclic GFR-binding peptide
  MOD_RES (2)..(3): Xaa is C or S
PXXVPQALSPISILYK

SEQ ID NO: 10348 - protein, 16 aa, Artificial Sequence
  Cyclic GFR-binding peptide
  MOD_RES (2)..(3): Xaa is C or S
PXXAPTQLEPISVLYL

SEQ ID NO: 10349 - protein, 17 aa, Artificial Sequence
  Cyclic GFR-binding peptide
KLEPISVLYLDDMGVPT

SEQ ID NO: 10350 - protein, 14 aa, Artificial Sequence
  Cyclic GFR-binding peptide
  MOD_RES (1)..(1): Xaa is C or S
XVPEKMSPISILYK

SEQ ID NO: 10351 - protein, 14 aa, Artificial Sequence
  Cyclic GFR-binding peptide
  MOD_RES (1)..(1): Xaa is C or S
XVPTRLSPINILYF

SEQ ID NO: 10352 - protein, 16 aa, Artificial Sequence
  Cyclic GFR-binding peptide
  MOD_RES (2)..(3): Xaa is C or S
PXXAPTKLSATSVLYY

SEQ ID NO: 10353 - protein, 20 aa, Artificial Sequence
  Cyclic GFR-binding peptide
  MOD_RES (6)..(7): Xaa is C or S
KASKAXXVPTKLSPINILYF

SEQ ID NO: 10354 - protein, 16 aa, Artificial Sequence
  Cyclic GFR-binding peptide
MEPISMLYLNDKQQII

SEQ ID NO: 10355 - protein, 18 aa, Artificial Sequence
  Cyclic GFR-binding peptide
TELEPISMLYLDEYDKVV

SEQ ID NO: 10356 - protein, 18 aa, Artificial Sequence
  Cyclic GFR-binding peptide
TKLEPISVLYLDSSNNVI

SEQ ID NO: 10357 - protein, 17 aa, Artificial Sequence
  Cyclic GFR-binding peptide
  MOD_RES (3)..(4): Xaa is C or S
KAXXVPTKLNAISVLYF

SEQ ID NO: 10358 - protein, 27 aa, Artificial Sequence
  Cyclic GFR-binding peptide
  MOD_RES (6)..(7): Xaa is C or S
YVPKPXXAPTKLEPISVLYLDDSSNVI

SEQ ID NO: 10359 - protein, 15 aa, Artificial Sequence
  Cyclic GFR-binding peptide
  MOD_RES (1)..(2): Xaa is C or S
XXTPTKMNAISMLYF

SEQ ID NO: 10360 - protein, 15 aa, Artificial Sequence
  Cyclic GFR-binding peptide
SPINMLYFDEYDKVV

SEQ ID NO: 10361 - protein, 27 aa, Artificial Sequence
  Cyclic GFR-binding peptide
  MOD_RES (6)..(7): Xaa is C or S
ASASPXXVSQDLSPISILYKIGKTPKI

SEQ ID NO: 10362 - protein, 18 aa, Artificial Sequence
  Cyclic GFR-binding peptide
EKMEPISILYLDENKNVV

SEQ ID NO: 10363 - protein, 17 aa, Artificial Sequence
  Cyclic GFR-binding peptide
  MOD_RES (3)..(4): Xaa is C or S
KPXXAPTKLEPISVLYL

SEQ ID NO: 10364 - protein, 15 aa, Artificial Sequence
  Cyclic GFR-binding peptide
  MOD_RES (1)..(2): Xaa is C or S
XXVPQDLNAISILYF

SEQ ID NO: 10365 - protein, 17 aa, Artificial Sequence
  Cyclic GFR-binding peptide
  MOD_RES (3)..(4): Xaa is C or S
EPXXVPEKMSPINILYF

SEQ ID NO: 10366 - protein, 14 aa, Artificial Sequence
  Cyclic GFR-binding peptide
  MOD_RES (1)..(1): Xaa is C or S
XVPTELSPISMLYK

SEQ ID NO: 10367 - protein, 18 aa, Artificial Sequence
  Cyclic GFR-binding peptide
  MOD_RES (4)..(5): Xaa is C or S
PEPXXVPEKMNAISILYF

SEQ ID NO: 10368 - protein, 16 aa, Artificial Sequence
  Cyclic GFR-binding peptide
LSPINILYFDAANNVV

SEQ ID NO: 10369 - protein, 15 aa, Artificial Sequence
  Cyclic GFR-binding peptide
  MOD_RES (1)..(2): Xaa is C or S
XXVPTRLSPISILYK

SEQ ID NO: 10370 - protein, 17 aa, Artificial Sequence
  Cyclic GFR-binding peptide
  MOD_RES (3)..(4): Xaa is C or S
SPXXVSQDLSATSILYY

SEQ ID NO: 10371 - protein, 18 aa, Artificial Sequence
  Cyclic GFR-binding peptide
TKLSATSVLYYDDSSNVI

SEQ ID NO: 10372 - protein, 17 aa, Artificial Sequence
  Cyclic GFR-binding peptide
RLNAISILYFDSANNVV

SEQ ID NO: 10373 - protein, 19 aa, Artificial Sequence
  Cyclic GFR-binding peptide
PTKMEPISMLYLNDKQQII

SEQ ID NO: 10374 - protein, 16 aa, Artificial Sequence
  Cyclic GFR-binding peptide
  MOD_RES (2)..(3): Xaa is C or S
TXXVPTRLNAISILYF

SEQ ID NO: 10375 - protein, 18 aa, Artificial Sequence
  Cyclic GFR-binding peptide
TQLSATSVLYYDDSSNVI

SEQ ID NO: 10376 - protein, 17 aa, Artificial Sequence
  Cyclic GFR-binding peptide
ELNAISMLYFDENEKVV

SEQ ID NO: 10377 - protein, 20 aa, Artificial Sequence
  Cyclic GFR-binding peptide
  MOD_RES (6)..(7): Xaa is C or S
GSAGPXXTPTKMSATSMLYY

SEQ ID NO: 10378 - protein, 16 aa, Artificial Sequence
  Cyclic GFR-binding peptide
  MOD_RES (2)..(3): Xaa is C or S
PXXVPEKMSPINILYF

SEQ ID NO: 10379 - protein, 16 aa, Artificial Sequence
  Cyclic GFR-binding peptide
LEPISMLYLDENEKVV

SEQ ID NO: 10380 - protein, 18 aa, Artificial Sequence
  Cyclic GFR-binding peptide
  MOD_RES (4)..(5): Xaa is C or S
ASPXXVPQDLEPISILYL

SEQ ID NO: 10381 - protein, 27 aa, Artificial Sequence
  Cyclic GFR-binding peptide
  MOD_RES (6)..(7): Xaa is C or S
ASASPXXVSQDLSPINILYFIGKTPKI

SEQ ID NO: 10382 - protein, 20 aa, Artificial Sequence
  Cyclic GFR-binding peptide
  MOD_RES (6)..(7): Xaa is C or S
ASAAPXXVPQALEPISILYL

SEQ ID NO: 10383 - protein, 17 aa, Artificial Sequence
  Cyclic GFR-binding peptide
ELEPISMLYLDENEKVV

SEQ ID NO: 10384 - protein, 16 aa, Artificial Sequence
  Cyclic GFR-binding peptide
TSPINMLYFDNGRVLL

SEQ ID NO: 10385 - protein, 19 aa, Artificial Sequence
  Cyclic GFR-binding peptide
PTKLSPINVLYFDSSNNVI

SEQ ID NO: 10386 - protein, 19 aa, Artificial Sequence
  Cyclic GFR-binding peptide
PTKLSPINVLYFDDSSNVI

SEQ ID NO: 10387 - protein, 13 aa, Artificial Sequence
  Cyclic GFR-binding peptide
VPTRLSPISILYK

SEQ ID NO: 10388 - protein, 16 aa, Artificial Sequence
  Cyclic GFR-binding peptide
  MOD_RES (2)..(3): Xaa is C or S
AXXVPTKLSPINVLYF

SEQ ID NO: 10389 - protein, 15 aa, Artificial Sequence
  Cyclic GFR-binding peptide
SATSILYYDAANNVV

SEQ ID NO: 10390 - protein, 27 aa, Artificial Sequence
  Cyclic GFR-binding peptide
  MOD_RES (6)..(7): Xaa is C or S
ASASPXXVPQDLEPISILYLVGRTPKV

SEQ ID NO: 10391 - protein, 15 aa, Artificial Sequence
  Cyclic GFR-binding peptide
SPINILYFDENKNVV

SEQ ID NO: 10392 - protein, 19 aa, Artificial Sequence
  Cyclic GFR-binding peptide
PTQLSPINVLYFDDSSNVI

SEQ ID NO: 10393 - protein, 17 aa, Artificial Sequence
  Cyclic GFR-binding peptide
  MOD_RES (3)..(4): Xaa is C or S
KAXXVPTELEPISMLYL

SEQ ID NO: 10394 - protein, 15 aa, Artificial Sequence
  Cyclic GFR-binding peptide
EPISILYLVGRTPKV

SEQ ID NO: 10395 - protein, 16 aa, Artificial Sequence
  Cyclic GFR-binding peptide
LSATSMLYYDEYDKVV

SEQ ID NO: 10396 - protein, 19 aa, Artificial Sequence
  Cyclic GFR-binding peptide
  MOD_RES (5)..(6): Xaa is C or S
ASKAXXVPTKLSATSILYY

SEQ ID NO: 10397 - protein, 15 aa, Artificial Sequence
  Cyclic GFR-binding peptide
  MOD_RES (2)..(2): Xaa is C or S
TXAPTKLSPISVLYK

SEQ ID NO: 10398 - protein, 18 aa, Artificial Sequence
  Cyclic GFR-binding peptide
TELNAISMLYFDEYDKVV

SEQ ID NO: 10399 - protein, 16 aa, Artificial Sequence
  Cyclic GFR-binding peptide
  MOD_RES (2)..(3): Xaa is C or S
AXXVPTKLSPINILYF

SEQ ID NO: 10400 - protein, 14 aa, Artificial Sequence
  Cyclic GFR-binding peptide
  MOD_RES (1)..(1): Xaa is C or S
XVSQDLNAISILYF

SEQ ID NO: 10401 - protein, 13 aa, Artificial Sequence
  Cyclic GFR-binding peptide
APTKLEPISVLYL

SEQ ID NO: 10402 - protein, 15 aa, Artificial Sequence
  Cyclic GFR-binding peptide
  MOD_RES (1)..(2): Xaa is C or S
XXVPTELSPISMLYK

SEQ ID NO: 10403 - protein, 16 aa, Artificial Sequence
  Cyclic GFR-binding peptide
LEPISVLYLDDMGVPT

SEQ ID NO: 10404 - protein, 14 aa, Artificial Sequence
  Cyclic GFR-binding peptide
  MOD_RES (1)..(1): Xaa is C or S
XVPQDLNAISILYF

SEQ ID NO: 10405 - protein, 13 aa, Artificial Sequence
  Cyclic GFR-binding peptide
VPQDLNAISILYF

SEQ ID NO: 10406 - protein, 15 aa, Artificial Sequence
  Cyclic GFR-binding peptide
  MOD_RES (1)..(2): Xaa is C or S
XXVSQDLSATSILYY

SEQ ID NO: 10407 - protein, 15 aa, Artificial Sequence
  Cyclic GFR-binding peptide
  MOD_RES (1)..(2): Xaa is C or S
XXAPTKLSPINVLYF

SEQ ID NO: 10408 - protein, 15 aa, Artificial Sequence
  Cyclic GFR-binding peptide
NAISVLYFDSSNNVI

SEQ ID NO: 10409 - protein, 16 aa, Artificial Sequence
  Cyclic GFR-binding peptide
LSPISMLYKDENEKVV

SEQ ID NO: 10410 - protein, 15 aa, Artificial Sequence
  Cyclic GFR-binding peptide
SATSVLYYDDMGVPT

SEQ ID NO: 10411 - protein, 18 aa, Artificial Sequence
  Cyclic GFR-binding peptide
EKMSPISILYKDENKNVV

SEQ ID NO: 10412 - protein, 16 aa, Artificial Sequence
  Cyclic GFR-binding peptide
  MOD_RES (2)..(3): Xaa is C or S
AXXVPTKLNAISVLYF

SEQ ID NO: 10413 - protein, 13 aa, Artificial Sequence
  Cyclic GFR-binding peptide
APVKTSPISMLYK

SEQ ID NO: 10414 - protein, 16 aa, Artificial Sequence
  Cyclic GFR-binding peptide
  MOD_RES (2)..(3): Xaa is C or S
PXXVSQDLSPISILYK

SEQ ID NO: 10415 - protein, 14 aa, Artificial Sequence
  Cyclic GFR-binding peptide
  MOD_RES (1)..(1): Xaa is C or S
XAPTKLEPISVLYL

SEQ ID NO: 10416 - protein, 18 aa, Artificial Sequence
  Cyclic GFR-binding peptide
  MOD_RES (4)..(5): Xaa is C or S
PSTXXAPVKTNAISMLYF

SEQ ID NO: 10417 - protein, 17 aa, Artificial Sequence
  Cyclic GFR-binding peptide
  MOD_RES (3)..(4): Xaa is C or S
STXXAPVKTSPINMLYF

SEQ ID NO: 10418 - protein, 20 aa, Artificial Sequence
  Cyclic GFR-binding peptide
  MOD_RES (6)..(7): Xaa is C or S
ASAAPXXVPQALSPINILYF

SEQ ID NO: 10419 - protein, 18 aa, Artificial Sequence
  Cyclic GFR-binding peptide
  MOD_RES (4)..(5): Xaa is C or S
SKAXXVPTKLSPISILYK

SEQ ID NO: 10420 - protein, 16 aa, Artificial Sequence
  Cyclic GFR-binding peptide
  MOD_RES (2)..(3): Xaa is C or S
PXXAPTQLSPINVLYF

SEQ ID NO: 10421 - protein, 18 aa, Artificial Sequence
  Cyclic GFR-binding peptide
  MOD_RES (4)..(5): Xaa is C or S
ASPXXVSQDLNAISILYF

SEQ ID NO: 10422 - protein, 18 aa, Artificial Sequence
  Cyclic GFR-binding peptide
  MOD_RES (4)..(5): Xaa is C or S
PKAXXAPTKLSPINVLYF

SEQ ID NO: 10423 - protein, 20 aa, Artificial Sequence
  Cyclic GFR-binding peptide
  MOD_RES (6)..(7): Xaa is C or S
YVPKPXXAPTKLSATSVLYY

SEQ ID NO: 10424 - protein, 19 aa, Artificial Sequence
  Cyclic GFR-binding peptide
  MOD_RES (5)..(6): Xaa is C or S
APASXXVPARLSPINILYF

SEQ ID NO: 10425 - protein, 14 aa, Artificial Sequence
  Cyclic GFR-binding peptide
  MOD_RES (1)..(1): Xaa is C or S
XVPARLSPISILYK

SEQ ID NO: 10426 - protein, 19 aa, Artificial Sequence
  Cyclic GFR-binding peptide
PTRLEPISILYLDSANNVV

SEQ ID NO: 10427 - protein, 20 aa, Artificial Sequence
  Cyclic GFR-binding peptide
  MOD_RES (6)..(7): Xaa is C or S
KIPKAXXVPTELEPISMLYL

SEQ ID NO: 10428 - protein, 14 aa, Artificial Sequence
  Cyclic GFR-binding peptide
  MOD_RES (1)..(1): Xaa is C or S
XTPTKMNAISMLYF

SEQ ID NO: 10429 - protein, 16 aa, Artificial Sequence
  Cyclic GFR-binding peptide
  MOD_RES (2)..(3): Xaa is C or S
AXXVPTKLEPISVLYL

SEQ ID NO: 10430 - protein, 19 aa, Artificial Sequence
  Cyclic GFR-binding peptide
PTELSPISMLYKDENEKVV

SEQ ID NO: 10431 - protein, 17 aa, Artificial Sequence
  Cyclic GFR-binding peptide
KLNAISVLYFDDMGVPT

SEQ ID NO: 10432 - protein, 18 aa, Artificial Sequence
  Cyclic GFR-binding peptide
  MOD_RES (4)..(5): Xaa is C or S
PKPXXAPTQLEPISVLYL

SEQ ID NO: 10433 - protein, 17 aa, Artificial Sequence
  Cyclic GFR-binding peptide
  MOD_RES (3)..(4): Xaa is C or S
KAXXVPTKLNAISILYF

SEQ ID NO: 10434 - protein, 17 aa, Artificial Sequence
  Cyclic GFR-binding peptide
QLSPINVLYFDDSSNVI

SEQ ID NO: 10435 - protein, 17 aa, Artificial Sequence
  Cyclic GFR-binding peptide
  MOD_RES (3)..(4): Xaa is C or S
KPXXAPTKLSPINVLYF

SEQ ID NO: 10436 - protein, 17 aa, Artificial Sequence
  Cyclic GFR-binding peptide
  MOD_RES (3)..(4): Xaa is C or S
PTXXVPTRLSPISILYK

SEQ ID NO: 10437 - protein, 27 aa, Artificial Sequence
  Cyclic GFR-binding peptide
  MOD_RES (6)..(7): Xaa is C or S
RVPSTXXAPVKTSPINMLYFDNGRVLL

SEQ ID NO: 10438 - protein, 27 aa, Artificial Sequence
  Cyclic GFR-binding peptide
  MOD_RES (6)..(7): Xaa is C or S
YVPKPXXAPTKLSPISVLYKDDSSNVI

SEQ ID NO: 10439 - protein, 19 aa, Artificial Sequence
  Cyclic GFR-binding peptide
  MOD_RES (5)..(6): Xaa is C or S
VGKAXXVPTKLSPINVLYF

SEQ ID NO: 10440 - protein, 20 aa, Artificial Sequence
  Cyclic GFR-binding peptide
  MOD_RES (6)..(7): Xaa is C or S
AAPASXXVPARLSPISILYK

SEQ ID NO: 10441 - protein, 18 aa, Artificial Sequence
  Cyclic GFR-binding peptide
TKLSPISVLYKDSSNNVI

SEQ ID NO: 10442 - protein, 18 aa, Artificial Sequence
  Cyclic GFR-binding peptide
QDLSATSILYYIGKTPKI

SEQ ID NO: 10443 - protein, 19 aa, Artificial Sequence
  Cyclic GFR-binding peptide
  MOD_RES (5)..(6): Xaa is C or S
SAGPXXTPTKMSPISMLYK

SEQ ID NO: 10444 - protein, 16 aa, Artificial Sequence
  Cyclic GFR-binding peptide
LNAISILYFDAANNVV

SEQ ID NO: 10445 - protein, 16 aa, Artificial Sequence
  Cyclic GFR-binding peptide
  MOD_RES (2)..(3): Xaa is C or S
SXXVPARLEPISILYL

SEQ ID NO: 10446 - protein, 15 aa, Artificial Sequence
  Cyclic GFR-binding peptide
SPINILYFDSANNVV

SEQ ID NO: 10447 - protein, 20 aa, Artificial Sequence
  Cyclic GFR-binding peptide
  MOD_RES (7)..(7): Xaa is C or S
HVTKPTXAPTKLSPINVLYF

SEQ ID NO: 10448 - protein, 19 aa, Artificial Sequence
  Cyclic GFR-binding peptide
  MOD_RES (5)..(6): Xaa is C or S
IPKAXXVPTELSATSMLYY

SEQ ID NO: 10449 - protein, 19 aa, Artificial Sequence
  Cyclic GFR-binding peptide
  MOD_RES (6)..(6): Xaa is C or S
VTKPTXAPTKLEPISVLYL

SEQ ID NO: 10450 - protein, 19 aa, Artificial Sequence
  Cyclic GFR-binding peptide
PTELSATSMLYYDEYDKVV

SEQ ID NO: 10451 - protein, 27 aa, Artificial Sequence
  Cyclic GFR-binding peptide
  MOD_RES (6)..(7): Xaa is C or S
ASASPXXVSQDLNAISILYFIGKTPKI

SEQ ID NO: 10452 - protein, 15 aa, Artificial Sequence
  Cyclic GFR-binding peptide
SATSMLYYDENEKVV

SEQ ID NO: 10453 - protein, 17 aa, Artificial Sequence
  Cyclic GFR-binding peptide
  MOD_RES (3)..(4): Xaa is C or S
SPXXVSQDLSPISILYK

SEQ ID NO: 10454 - protein, 16 aa, Artificial Sequence
  Cyclic GFR-binding peptide
  MOD_RES (2)..(3): Xaa is C or S
PXXVPEKMEPISILYL

SEQ ID NO: 10455 - protein, 27 aa, Artificial Sequence
  Cyclic GFR-binding peptide
  MOD_RES (6)..(7): Xaa is C or S
STPPTXXVPTRLNAISILYFDSANNVV

SEQ ID NO: 10456 - protein, 17 aa, Artificial Sequence
  Cyclic GFR-binding peptide
KLNAISVLYFDSSNNVI

SEQ ID NO: 10457 - protein, 14 aa, Artificial Sequence
  Cyclic GFR-binding peptide
  MOD_RES (1)..(1): Xaa is C or S
XVPQALNAISILYF

SEQ ID NO: 10458 - protein, 19 aa, Artificial Sequence
  Cyclic GFR-binding peptide
  MOD_RES (5)..(6): Xaa is C or S
IPEPXXVPEKMSPINILYF

SEQ ID NO: 10459 - protein, 17 aa, Artificial Sequence
  Cyclic GFR-binding peptide
KTNAISMLYFDNGRVLL

SEQ ID NO: 10460 - protein, 27 aa, Artificial Sequence
  Cyclic GFR-binding peptide
  MOD_RES (6)..(7): Xaa is C or S
ASASPXXVPQDLNAISILYFVGRTPKV

SEQ ID NO: 10461 - protein, 15 aa, Artificial Sequence
  Cyclic GFR-binding peptide
  MOD_RES (1)..(2): Xaa is C or S
XXTPTKMSATSMLYY

SEQ ID NO: 10462 - protein, 19 aa, Artificial Sequence
  Cyclic GFR-binding peptide
PTKMNAISMLYFNDKQQII

SEQ ID NO: 10463 - protein, 20 aa, Artificial Sequence
  Cyclic GFR-binding peptide
  MOD_RES (6)..(7): Xaa is C or S
GSAGPXXTPTKMEPISMLYL

SEQ ID NO: 10464 - protein, 17 aa, Artificial Sequence
  Cyclic GFR-binding peptide
KLSPINVLYFDDSSNVI

SEQ ID NO: 10465 - protein, 17 aa, Artificial Sequence
  Cyclic GFR-binding peptide
RLSATSILYYDSANNVV

SEQ ID NO: 10466 - protein, 16 aa, Artificial Sequence
  Cyclic GFR-binding peptide
LSPISILYKDAANNVV

SEQ ID NO: 10467 - protein, 17 aa, Artificial Sequence
  Cyclic GFR-binding peptide
DLNAISILYFIGKTPKI

SEQ ID NO: 10468 - protein, 27 aa, Artificial Sequence
  Cyclic GFR-binding peptide
  MOD_RES (6)..(7): Xaa is C or S
KVGKAXXVPTKLSPINVLYFDDMGVPT

SEQ ID NO: 10469 - protein, 20 aa, Artificial Sequence
  Cyclic GFR-binding peptide
  MOD_RES (6)..(7): Xaa is C or S
AAPASXXVPARLNAISILYF

SEQ ID NO: 10470 - protein, 13 aa, Artificial Sequence
  Cyclic GFR-binding peptide
VPTRLSPINILYF

SEQ ID NO: 10471 - protein, 18 aa, Artificial Sequence
  Cyclic GFR-binding peptide
  MOD_RES (4)..(5): Xaa is C or S
ASPXXVSQDLEPISILYL

SEQ ID NO: 10472 - protein, 19 aa, Artificial Sequence
  Cyclic GFR-binding peptide
PTKLEPISVLYLDSSNNVI

SEQ ID NO: 10473 - protein, 19 aa, Artificial Sequence
  Cyclic GFR-binding peptide
  MOD_RES (5)..(6): Xaa is C or S
IPKAXXVPTELSPISMLYK

SEQ ID NO: 10474 - protein, 16 aa, Artificial Sequence
  Cyclic GFR-binding peptide
LSPISILYKIGKTPKI

SEQ ID NO: 10475 - protein, 27 aa, Artificial Sequence
  Cyclic GFR-binding peptide
  MOD_RES (6)..(7): Xaa is C or S
SIPKAXXVPTELSATSMLYYDEYDKVV

SEQ ID NO: 10476 - protein, 18 aa, Artificial Sequence
  Cyclic GFR-binding peptide
VKTEPISMLYLDNGRVLL

SEQ ID NO: 10477 - protein, 27 aa, Artificial Sequence
  Cyclic GFR-binding peptide
  MOD_RES (6)..(7): Xaa is C or S
ASASPXXVSQDLEPISILYLIGKTPKI

SEQ ID NO: 10478 - protein, 17 aa, Artificial Sequence
  Cyclic GFR-binding peptide
  MOD_RES (3)..(4): Xaa is C or S
ASXXVPARLSPISILYK

SEQ ID NO: 10479 - protein, 15 aa, Artificial Sequence
  Cyclic GFR-binding peptide
  MOD_RES (1)..(2): Xaa is C or S
XXVPQALSPINILYF

SEQ ID NO: 10480 - protein, 17 aa, Artificial Sequence
  Cyclic GFR-binding peptide
  MOD_RES (3)..(4): Xaa is C or S
SPXXVPQDLSATSILYY

SEQ ID NO: 10481 - protein, 20 aa, Artificial Sequence
  Cyclic GFR-binding peptide
  MOD_RES (6)..(7): Xaa is C or S
TVPKPXXAPTQLSPINVLYF

SEQ ID NO: 10482 - protein, 16 aa, Artificial Sequence
  Cyclic GFR-binding peptide
  MOD_RES (2)..(3): Xaa is C or S
AXXVPTELSPISMLYK

SEQ ID NO: 10483 - protein, 16 aa, Artificial Sequence
  Cyclic GFR-binding peptide
LSPINVLYFDDMGVPT

SEQ ID NO: 10484 - protein, 19 aa, Artificial Sequence
  Cyclic GFR-binding peptide
PTKLNAISVLYFDDMGVPT

SEQ ID NO: 10485 - protein, 18 aa, Artificial Sequence
  Cyclic GFR-binding peptide
  MOD_RES (4)..(5): Xaa is C or S
ASPXXVPQDLSPINILYF

SEQ ID NO: 10486 - protein, 15 aa, Artificial Sequence
  Cyclic GFR-binding peptide
SPISILYKDKGVVTY

SEQ ID NO: 10487 - protein, 19 aa, Artificial Sequence
  Cyclic GFR-binding peptide
SQDLEPISILYLIGKTPKI

SEQ ID NO: 10488 - protein, 18 aa, Artificial Sequence
  Cyclic GFR-binding peptide
  MOD_RES (4)..(5): Xaa is C or S
PSTXXAPVKTSATSMLYY

SEQ ID NO: 10489 - protein, 19 aa, Artificial Sequence
  Cyclic GFR-binding peptide
PVKTSPISMLYKDNGRVLL

SEQ ID NO: 10490 - protein, 17 aa, Artificial Sequence
  Cyclic GFR-binding peptide
ALSATSILYYVGRKPKV

SEQ ID NO: 10491 - protein, 15 aa, Artificial Sequence
  Cyclic GFR-binding peptide
EPISILYLVGRKPKV

SEQ ID NO: 10492 - protein, 27 aa, Artificial Sequence
  Cyclic GFR-binding peptide
  MOD_RES (6)..(7): Xaa is C or S
ASAAPXXVPQALSPINILYFVGRKPKV

SEQ ID NO: 10493 - protein, 18 aa, Artificial Sequence
  Cyclic GFR-binding peptide
  MOD_RES (5)..(5): Xaa is C or S
TKPTXAPTKLSATSVLYY

SEQ ID NO: 10494 - protein, 13 aa, Artificial Sequence
  Cyclic GFR-binding peptide
VPTELSPISMLYK

SEQ ID NO: 10495 - protein, 17 aa, Artificial Sequence
  Cyclic GFR-binding peptide
KMSPISILYKDENKNVV

SEQ ID NO: 10496 - protein, 16 aa, Artificial Sequence
  Cyclic GFR-binding peptide
LNAISILYFVGRTPKV

SEQ ID NO: 10497 - protein, 13 aa, Artificial Sequence
  Cyclic GFR-binding peptide
VPEKMEPISILYL

SEQ ID NO: 10498 - protein, 18 aa, Artificial Sequence
  Cyclic GFR-binding peptide
ARLSATSILYYDAANNVV

SEQ ID NO: 10499 - protein, 13 aa, Artificial Sequence
  Cyclic GFR-binding peptide
VPTKLNAISVLYF

SEQ ID NO: 10500 - protein, 17 aa, Artificial Sequence
  Cyclic GFR-binding peptide
ELNAISMLYFDEYDKVV

SEQ ID NO: 10501 - protein, 14 aa, Artificial Sequence
  Cyclic GFR-binding peptide
  MOD_RES (1)..(1): Xaa is C or S
XVSQDLSPISILYK

SEQ ID NO: 10502 - protein, 18 aa, Artificial Sequence
  Cyclic GFR-binding peptide
  MOD_RES (4)..(5): Xaa is C or S
PASXXVPARLSATSILYY

SEQ ID NO: 10503 - protein, 19 aa, Artificial Sequence
  Cyclic GFR-binding peptide
  MOD_RES (5)..(6): Xaa is C or S
VPKAXXAPTKLNAISVLYF

SEQ ID NO: 10504 - protein, 20 aa, Artificial Sequence
  Cyclic GFR-binding peptide
  MOD_RES (6)..(7): Xaa is C or S
HVPKPXXAPTKLSATSVLYY

SEQ ID NO: 10505 - protein, 15 aa, Artificial Sequence
  Cyclic GFR-binding peptide
SPISVLYKDSSNNVI

SEQ ID NO: 10506 - protein, 15 aa, Artificial Sequence
  Cyclic GFR-binding peptide
SPINMLYFDNGRVLL

SEQ ID NO: 10507 - protein, 15 aa, Artificial Sequence
  Cyclic GFR-binding peptide
SPISMLYKDEYDKVV

SEQ ID NO: 10508 - protein, 16 aa, Artificial Sequence
  Cyclic GFR-binding peptide
LSATSILYYDKGVVTY

SEQ ID NO: 10509 - protein, 19 aa, Artificial Sequence
  Cyclic GFR-binding peptide
  MOD_RES (5)..(6): Xaa is C or S
SASPXXVPQDLNAISILYF

SEQ ID NO: 10510 - protein, 17 aa, Artificial Sequence
  Cyclic GFR-binding peptide
KLNAISILYFDKGVVTY

SEQ ID NO: 10511 - protein, 19 aa, Artificial Sequence
  Cyclic GFR-binding peptide
  MOD_RES (5)..(6): Xaa is C or S
VPKAXXAPTKLSPISVLYK

SEQ ID NO: 10512 - protein, 18 aa, Artificial Sequence
  Cyclic GFR-binding peptide
TRLEPISILYLDSANNVV

SEQ ID NO: 10513 - protein, 16 aa, Artificial Sequence
  Cyclic GFR-binding peptide
  MOD_RES (2)..(3): Xaa is C or S
AXXVPTELNAISMLYF

SEQ ID NO: 10514 - protein, 17 aa, Artificial Sequence
  Cyclic GFR-binding peptide
  MOD_RES (3)..(4): Xaa is C or S
APXXVPQALSATSILYY

SEQ ID NO: 10515 - protein, 18 aa, Artificial Sequence
  Cyclic GFR-binding peptide
TELEPISMLYLDENEKVV

SEQ ID NO: 10516 - protein, 18 aa, Artificial Sequence
  Cyclic GFR-binding peptide
  MOD_RES (4)..(5): Xaa is C or S
PPTXXVPTRLSPINILYF

SEQ ID NO: 10517 - protein, 18 aa, Artificial Sequence
  Cyclic GFR-binding peptide
  MOD_RES (4)..(5): Xaa is C or S
AAPXXVPQALSPINILYF

SEQ ID NO: 10518 - protein, 16 aa, Artificial Sequence
  Cyclic GFR-binding peptide
  MOD_RES (2)..(3): Xaa is C or S
AXXVPTKLSPISILYK

SEQ ID NO: 10519 - protein, 16 aa, Artificial Sequence
  Cyclic GFR-binding peptide
  MOD_RES (2)..(3): Xaa is C or S
AXXAPTKLSPINVLYF

SEQ ID NO: 10520 - protein, 15 aa, Artificial Sequence
  Cyclic GFR-binding peptide
  MOD_RES (1)..(2): Xaa is C or S
XXVPEKMSPINILYF

SEQ ID NO: 10521 - protein, 19 aa, Artificial Sequence
  Cyclic GFR-binding peptide
PTKLSATSVLYYDDMGVPT

SEQ ID NO: 10522 - protein, 17 aa, Artificial Sequence
  Cyclic GFR-binding peptide
ELSPISMLYKDEYDKVV

SEQ ID NO: 10523 - protein, 13 aa, Artificial Sequence
  Cyclic GFR-binding peptide
VPQALEPISILYL

SEQ ID NO: 10524 - protein, 19 aa, Artificial Sequence
  Cyclic GFR-binding peptide
PVKTNAISMLYFDNGRVLL

SEQ ID NO: 10525 - protein, 13 aa, Artificial Sequence
  Cyclic GFR-binding peptide
VPARLSPINILYF

SEQ ID NO: 10526 - protein, 17 aa, Artificial Sequence
  Cyclic GFR-binding peptide
ELSPINMLYFDENEKVV

SEQ ID NO: 10527 - protein, 15 aa, Artificial Sequence
  Cyclic GFR-binding peptide
  MOD_RES (1)..(2): Xaa is C or S
XXVPARLEPISILYL

SEQ ID NO: 10528 - protein, 16 aa, Artificial Sequence
  Cyclic GFR-binding peptide
  MOD_RES (2)..(3): Xaa is C or S
AXXVPTKLSATSILYY

SEQ ID NO: 10529 - protein, 19 aa, Artificial Sequence
  Cyclic GFR-binding peptide
  MOD_RES (5)..(6): Xaa is C or S
SAGPXXTPTKMSATSMLYY

SEQ ID NO: 10530 - protein, 18 aa, Artificial Sequence
  Cyclic GFR-binding peptide
  MOD_RES (4)..(5): Xaa is C or S
PKAXXAPTKLEPISVLYL

SEQ ID NO: 10531 - protein, 18 aa, Artificial Sequence
  Cyclic GFR-binding peptide
TKMEPISMLYLNDKQQII

SEQ ID NO: 10532 - protein, 19 aa, Artificial Sequence
  Cyclic GFR-binding peptide
  MOD_RES (5)..(6): Xaa is C or S
ASKAXXVPTKLSPISILYK

SEQ ID NO: 10533 - protein, 17 aa, Artificial Sequence
  Cyclic GFR-binding peptide
DLSPISILYKIGKTPKI

SEQ ID NO: 10534 - protein, 17 aa, Artificial Sequence
  Cyclic GFR-binding peptide
  MOD_RES (3)..(4): Xaa is C or S
KPXXAPTKLSATSVLYY

SEQ ID NO: 10535 - protein, 17 aa, Artificial Sequence
  Cyclic GFR-binding peptide
KTSPISMLYKDNGRVLL

SEQ ID NO: 10536 - protein, 15 aa, Artificial Sequence
  Cyclic GFR-binding peptide
SATSVLYYDDSSNVI

SEQ ID NO: 10537 - protein, 18 aa, Artificial Sequence
  Cyclic GFR-binding peptide
  MOD_RES (4)..(5): Xaa is C or S
GKAXXVPTKLSPINVLYF

SEQ ID NO: 10538 - protein, 19 aa, Artificial Sequence
  Cyclic GFR-binding peptide
  MOD_RES (5)..(6): Xaa is C or S
VPSTXXAPVKTSPINMLYF

SEQ ID NO: 10539 - protein, 15 aa, Artificial Sequence
  Cyclic GFR-binding peptide
  MOD_RES (1)..(2): Xaa is C or S
XXAPTQLSPINVLYF

SEQ ID NO: 10540 - protein, 13 aa, Artificial Sequence
  Cyclic GFR-binding peptide
TPTKMNAISMLYF

SEQ ID NO: 10541 - protein, 20 aa, Artificial Sequence
  Cyclic GFR-binding peptide
  MOD_RES (6)..(7): Xaa is C or S
RVPSTXXAPVKTNAISMLYF

SEQ ID NO: 10542 - protein, 17 aa, Artificial Sequence
  Cyclic GFR-binding peptide
RLSATSILYYDAANNVV

SEQ ID NO: 10543 - protein, 16 aa, Artificial Sequence
  Cyclic GFR-binding peptide
  MOD_RES (2)..(3): Xaa is C or S
AXXAPTKLSPISVLYK

SEQ ID NO: 10544 - protein, 18 aa, Artificial Sequence
  Cyclic GFR-binding peptide
TKLSPINVLYFDSSNNVI

SEQ ID NO: 10545 - protein, 20 aa, Artificial Sequence
  Cyclic GFR-binding peptide
  MOD_RES (6)..(7): Xaa is C or S
GIPEPXXVPEKMSPISILYK

SEQ ID NO: 10546 - protein, 19 aa, Artificial Sequence
  Cyclic GFR-binding peptide
PQALNAISILYFVGRKPKV

SEQ ID NO: 10547 - protein, 27 aa, Artificial Sequence
  Cyclic GFR-binding peptide
  MOD_RES (6)..(7): Xaa is C or S
STPPTXXVPTRLSPISILYKDSANNVV

SEQ ID NO: 10548 - protein, 14 aa, Artificial Sequence
  Cyclic GFR-binding peptide
  MOD_RES (1)..(1): Xaa is C or S
XVPTRLNAISILYF

SEQ ID NO: 10549 - protein, 19 aa, Artificial Sequence
  Cyclic GFR-binding peptide
PTKMSPISMLYKNDKQQII

SEQ ID NO: 10550 - protein, 14 aa, Artificial Sequence
  Cyclic GFR-binding peptide
  MOD_RES (1)..(1): Xaa is C or S
XAPVKTSPINMLYF

SEQ ID NO: 10551 - protein, 15 aa, Artificial Sequence
  Cyclic GFR-binding peptide
  MOD_RES (1)..(2): Xaa is C or S
XXVSQDLSPINILYF

SEQ ID NO: 10552 - protein, 18 aa, Artificial Sequence
  Cyclic GFR-binding peptide
QDLEPISILYLVGRTPKV

SEQ ID NO: 10553 - protein, 15 aa, Artificial Sequence
  Cyclic GFR-binding peptide
  MOD_RES (1)..(2): Xaa is C or S
XXVPQDLSATSILYY

SEQ ID NO: 10554 - protein, 15 aa, Artificial Sequence
  Cyclic GFR-binding peptide
NAISMLYFDEYDKVV

SEQ ID NO: 10555 - protein, 27 aa, Artificial Sequence
  Cyclic GFR-binding peptide
  MOD_RES (6)..(7): Xaa is C or S
AVPKAXXAPTKLEPISVLYLDSSNNVI

SEQ ID NO: 10556 - protein, 20 aa, Artificial Sequence
  Cyclic GFR-binding peptide
  MOD_RES (6)..(7): Xaa is C or S
KVGKAXXVPTKLSATSVLYY

SEQ ID NO: 10557 - protein, 19 aa, Artificial Sequence
  Cyclic GFR-binding peptide
PTRLSPISILYKDSANNVV

SEQ ID NO: 10558 - protein, 16 aa, Artificial Sequence
  Cyclic GFR-binding peptide
LSPISVLYKDDSSNVI

SEQ ID NO: 10559 - protein, 16 aa, Artificial Sequence
  Cyclic GFR-binding peptide
  MOD_RES (2)..(3): Xaa is C or S
PXXVPQALSPINILYF

SEQ ID NO: 10560 - protein, 17 aa, Artificial Sequence
  Cyclic GFR-binding peptide
KMSATSMLYYNDKQQII

SEQ ID NO: 10561 - protein, 16 aa, Artificial Sequence
  Cyclic GFR-binding peptide
LSPISILYKVGRKPKV

SEQ ID NO: 10562 - protein, 13 aa, Artificial Sequence
  Cyclic GFR-binding peptide
VSQDLNAISILYF

SEQ ID NO: 10563 - protein, 18 aa, Artificial Sequence
  Cyclic GFR-binding peptide
TKLSPINILYFDKGVVTY

SEQ ID NO: 10564 - protein, 16 aa, Artificial Sequence
  Cyclic GFR-binding peptide
  MOD_RES (2)..(3): Xaa is C or S
PXXVPQDLSPISILYK

SEQ ID NO: 10565 - protein, 15 aa, Artificial Sequence
  Cyclic GFR-binding peptide
  MOD_RES (1)..(2): Xaa is C or S
XXVSQDLSPISILYK

SEQ ID NO: 10566 - protein, 27 aa, Artificial Sequence
  Cyclic GFR-binding peptide
  MOD_RES (6)..(7): Xaa is C or S
TVPKPXXAPTQLSPISVLYKDDSSNVI

SEQ ID NO: 10567 - protein, 18 aa, Artificial Sequence
  Cyclic GFR-binding peptide
  MOD_RES (4)..(5): Xaa is C or S
PASXXVPARLSPISILYK

SEQ ID NO: 10568 - protein, 19 aa, Artificial Sequence
  Cyclic GFR-binding peptide
  MOD_RES (5)..(6): Xaa is C or S
TPPTXXVPTRLSPINILYF

SEQ ID NO: 10569 - protein, 17 aa, Artificial Sequence
  Cyclic GFR-binding peptide
  MOD_RES (4)..(4): Xaa is C or S
KPTXAPTKLSPISVLYK

SEQ ID NO: 10570 - protein, 15 aa, Artificial Sequence
  Cyclic GFR-binding peptide
EPISILYLIGKTPKI

SEQ ID NO: 10571 - protein, 14 aa, Artificial Sequence
  Cyclic GFR-binding peptide
  MOD_RES (1)..(1): Xaa is C or S
XVSQDLSATSILYY

SEQ ID NO: 10572 - protein, 19 aa, Artificial Sequence
  Cyclic GFR-binding peptide
  MOD_RES (5)..(6): Xaa is C or S
ASKAXXVPTKLSPINILYF

SEQ ID NO: 10573 - protein, 13 aa, Artificial Sequence
  Cyclic GFR-binding peptide
VPTELSATSMLYY

SEQ ID NO: 10574 - protein, 18 aa, Artificial Sequence
  Cyclic GFR-binding peptide
TKLSATSILYYDKGVVTY

SEQ ID NO: 10575 - protein, 20 aa, Artificial Sequence
  Cyclic GFR-binding peptide
  MOD_RES (6)..(7): Xaa is C or S
AVPKAXXAPTKLEPISVLYL

SEQ ID NO: 10576 - protein, 16 aa, Artificial Sequence
  Cyclic GFR-binding peptide
LSPISILYKVGRTPKV

SEQ ID NO: 10577 - protein, 15 aa, Artificial Sequence
  Cyclic GFR-binding peptide
  MOD_RES (1)..(2): Xaa is C or S
XXVPQALSPISILYK

SEQ ID NO: 10578 - protein, 18 aa, Artificial Sequence
  Cyclic GFR-binding peptide
  MOD_RES (4)..(5): Xaa is C or S
PSTXXAPVKTSPISMLYK

SEQ ID NO: 10579 - protein, 19 aa, Artificial Sequence
  Cyclic GFR-binding peptide
PQALSATSILYYVGRKPKV

SEQ ID NO: 10580 - protein, 14 aa, Artificial Sequence
  Cyclic GFR-binding peptide
  MOD_RES (1)..(1): Xaa is C or S
XVPTKLSPINILYF

SEQ ID NO: 10581 - protein, 15 aa, Artificial Sequence
  Cyclic GFR-binding peptide
  MOD_RES (1)..(2): Xaa is C or S
XXAPVKTSPINMLYF

SEQ ID NO: 10582 - protein, 17 aa, Artificial Sequence
  Cyclic GFR-binding peptide
QLSATSVLYYDDSSNVI

SEQ ID NO: 10583 - protein, 14 aa, Artificial Sequence
  Cyclic GFR-binding peptide
  MOD_RES (1)..(1): Xaa is C or S
XAPTQLSPINVLYF

SEQ ID NO: 10584 - protein, 16 aa, Artificial Sequence
  Cyclic GFR-binding peptide
  MOD_RES (2)..(3): Xaa is C or S
AXXVPTELSATSMLYY

SEQ ID NO: 10585 - protein, 27 aa, Artificial Sequence
  Cyclic GFR-binding peptide
  MOD_RES (6)..(7): Xaa is C or S
KASKAXXVPTKLSPINILYFDKGVVTY

SEQ ID NO: 10586 - protein, 19 aa, Artificial Sequence
  Cyclic GFR-binding peptide
  MOD_RES (5)..(6): Xaa is C or S
SASPXXVSQDLNAISILYF

SEQ ID NO: 10587 - protein, 19 aa, Artificial Sequence
  Cyclic GFR-binding peptide
  MOD_RES (5)..(6): Xaa is C or S
IPKAXXVPTELSPINMLYF

SEQ ID NO: 10588 - protein, 27 aa, Artificial Sequence
  Cyclic GFR-binding peptide
  MOD_RES (6)..(7): Xaa is C or S
RVPSTXXAPVKTSATSMLYYDNGRVLL

SEQ ID NO: 10589 - protein, 17 aa, Artificial Sequence
  Cyclic GFR-binding peptide
  MOD_RES (4)..(4): Xaa is C or S
KPTXAPTKLSATSVLYY

SEQ ID NO: 10590 - protein, 19 aa, Artificial Sequence
  Cyclic GFR-binding peptide
PEKMNAISILYFDENKNVV

SEQ ID NO: 10591 - protein, 17 aa, Artificial Sequence
  Cyclic GFR-binding peptide
KLSATSVLYYDDSSNVI

SEQ ID NO: 10592 - protein, 18 aa, Artificial Sequence
  Cyclic GFR-binding peptide
QALNAISILYFVGRKPKV

SEQ ID NO: 10593 - protein, 16 aa, Artificial Sequence
  Cyclic GFR-binding peptide
LNAISILYFIGKTPKI

SEQ ID NO: 10594 - protein, 18 aa, Artificial Sequence
  Cyclic GFR-binding peptide
  MOD_RES (4)..(5): Xaa is C or S
AAPXXVPQALSPISILYK

SEQ ID NO: 10595 - protein, 18 aa, Artificial Sequence
  Cyclic GFR-binding peptide
TKLEPISVLYLDDSSNVI

SEQ ID NO: 10596 - protein, 14 aa, Artificial Sequence
  Cyclic GFR-binding peptide
  MOD_RES (1)..(1): Xaa is C or S
XVPARLEPISILYL

SEQ ID NO: 10597 - protein, 18 aa, Artificial Sequence
  Cyclic GFR-binding peptide
QALSPINILYFVGRKPKV

SEQ ID NO: 10598 - protein, 20 aa, Artificial Sequence
  Cyclic GFR-binding peptide
  MOD_RES (6)..(7): Xaa is C or S
RVPSTXXAPVKTEPISMLYL

SEQ ID NO: 10599 - protein, 13 aa, Artificial Sequence
  Cyclic GFR-binding peptide
VPTKLSATSVLYY

SEQ ID NO: 10600 - protein, 18 aa, Artificial Sequence
  Cyclic GFR-binding peptide
TQLEPISVLYLDDSSNVI

SEQ ID NO: 10601 - protein, 20 aa, Artificial Sequence
  Cyclic GFR-binding peptide
  MOD_RES (6)..(7): Xaa is C or S
SIPKAXXVPTELSPINMLYF

SEQ ID NO: 10602 - protein, 17 aa, Artificial Sequence
  Cyclic GFR-binding peptide
  MOD_RES (3)..(4): Xaa is C or S
PTXXVPTRLSPINILYF

SEQ ID NO: 10603 - protein, 16 aa, Artificial Sequence
  Cyclic GFR-binding peptide
MEPISILYLDENKNVV

SEQ ID NO: 10604 - protein, 16 aa, Artificial Sequence
  Cyclic GFR-binding peptide
LSPINILYFIGKTPKI

SEQ ID NO: 10605 - protein, 14 aa, Artificial Sequence
  Cyclic GFR-binding peptide
  MOD_RES (1)..(1): Xaa is C or S
XTPTKMSATSMLYY

SEQ ID NO: 10606 - protein, 18 aa, Artificial Sequence
  Cyclic GFR-binding peptide
  MOD_RES (4)..(5): Xaa is C or S
PKAXXVPTELSPINMLYF

SEQ ID NO: 10607 - protein, 20 aa, Artificial Sequence
  Cyclic GFR-binding peptide
  MOD_RES (6)..(7): Xaa is C or S
KVGKAXXVPTKLNAISVLYF

SEQ ID NO: 10608 - protein, 18 aa, Artificial Sequence
  Cyclic GFR-binding peptide
  MOD_RES (4)..(5): Xaa is C or S
PKPXXAPTQLSPISVLYK

SEQ ID NO: 10609 - protein, 18 aa, Artificial Sequence
  Cyclic GFR-binding peptide
TELSATSMLYYDEYDKVV

SEQ ID NO: 10610 - protein, 13 aa, Artificial Sequence
  Cyclic GFR-binding peptide
APTQLSPISVLYK

SEQ ID NO: 10611 - protein, 27 aa, Artificial Sequence
  Cyclic GFR-binding peptide
  MOD_RES (6)..(7): Xaa is C or S
ASASPXXVPQDLSPISILYKVGRTPKV

SEQ ID NO: 10612 - protein, 16 aa, Artificial Sequence
  Cyclic GFR-binding peptide
  MOD_RES (2)..(3): Xaa is C or S
TXXAPVKTSATSMLYY

SEQ ID NO: 10613 - protein, 15 aa, Artificial Sequence
  Cyclic GFR-binding peptide
SPINMLYFDENEKVV

SEQ ID NO: 10614 - protein, 15 aa, Artificial Sequence
  Cyclic GFR-binding peptide
  MOD_RES (1)..(2): Xaa is C or S
XXTPTKMSPISMLYK

SEQ ID NO: 10615 - protein, 13 aa, Artificial Sequence
  Cyclic GFR-binding peptide
VPTKLSPISILYK

SEQ ID NO: 10616 - protein, 27 aa, Artificial Sequence
  Cyclic GFR-binding peptide
  MOD_RES (6)..(7): Xaa is C or S
KASKAXXVPTKLNAISILYFDKGVVTY

SEQ ID NO: 10617 - protein, 14 aa, Artificial Sequence
  Cyclic GFR-binding peptide
  MOD_RES (1)..(1): Xaa is C or S
XVPQALSATSILYY

SEQ ID NO: 10618 - protein, 15 aa, Artificial Sequence
  Cyclic GFR-binding peptide
SATSILYYDSANNVV

SEQ ID NO: 10619 - protein, 18 aa, Artificial Sequence
  Cyclic GFR-binding peptide
TKLSPINVLYFDDMGVPT

SEQ ID NO: 10620 - protein, 16 aa, Artificial Sequence
  Cyclic GFR-binding peptide
MSPISMLYKNDKQQII

SEQ ID NO: 10621 - protein, 16 aa, Artificial Sequence
  Cyclic GFR-binding peptide
  MOD_RES (2)..(3): Xaa is C or S
PXXVSQDLSPINILYF

SEQ ID NO: 10622 - protein, 20 aa, Artificial Sequence
  Cyclic GFR-binding peptide
  MOD_RES (6)..(7): Xaa is C or S
ASAAPXXVPQALSATSILYY

SEQ ID NO: 10623 - protein, 17 aa, Artificial Sequence
  Cyclic GFR-binding peptide
  MOD_RES (3)..(4): Xaa is C or S
STXXAPVKTSATSMLYY

SEQ ID NO: 10624 - protein, 27 aa, Artificial Sequence
  Cyclic GFR-binding peptide
  MOD_RES (6)..(7): Xaa is C or S
HVPKPXXAPTKLSATSVLYYDDSSNVI

SEQ ID NO: 10625 - protein, 18 aa, Artificial Sequence
  Cyclic GFR-binding peptide
  MOD_RES (4)..(5): Xaa is C or S
PKPXXAPTKLSATSVLYY

SEQ ID NO: 10626 - protein, 13 aa, Artificial Sequence
  Cyclic GFR-binding peptide
VSQDLEPISILYL

SEQ ID NO: 10627 - protein, 14 aa, Artificial Sequence
  Cyclic GFR-binding peptide
  MOD_RES (1)..(1): Xaa is C or S
XVPTELSPINMLYF

SEQ ID NO: 10628 - protein, 14 aa, Artificial Sequence
  Cyclic GFR-binding peptide
  MOD_RES (1)..(1): Xaa is C or S
XVPQDLSPISILYK

SEQ ID NO: 10629 - protein, 19 aa, Artificial Sequence
  Cyclic GFR-binding peptide
  MOD_RES (5)..(6): Xaa is C or S
VPKPXXAPTQLSPINVLYF

SEQ ID NO: 10630 - protein, 17 aa, Artificial Sequence
  Cyclic GFR-binding peptide
KMSPINILYFDENKNVV

SEQ ID NO: 10631 - protein, 16 aa, Artificial Sequence
  Cyclic GFR-binding peptide
LSPISILYKDSANNVV

SEQ ID NO: 10632 - protein, 16 aa, Artificial Sequence
  Cyclic GFR-binding peptide
LSPINILYFDSANNVV

SEQ ID NO: 10633 - protein, 13 aa, Artificial Sequence
  Cyclic GFR-binding peptide
VPEKMSATSILYY

SEQ ID NO: 10634 - protein, 19 aa, Artificial Sequence
  Cyclic GFR-binding peptide
  MOD_RES (5)..(6): Xaa is C or S
SAGPXXTPTKMEPISMLYL

SEQ ID NO: 10635 - protein, 27 aa, Artificial Sequence
  Cyclic GFR-binding peptide
  MOD_RES (6)..(7): Xaa is C or S
ASAAPXXVPQALSATSILYYVGRKPKV

SEQ ID NO: 10636 - protein, 15 aa, Artificial Sequence
  Cyclic GFR-binding peptide
  MOD_RES (1)..(2): Xaa is C or S
XXVPQDLSPISILYK

SEQ ID NO: 10637 - protein, 18 aa, Artificial Sequence
  Cyclic GFR-binding peptide
  MOD_RES (4)..(5): Xaa is C or S
SKAXXVPTKLSPINILYF

SEQ ID NO: 10638 - protein, 13 aa, Artificial Sequence
  Cyclic GFR-binding peptide
VPTELNAISMLYF

SEQ ID NO: 10639 - protein, 19 aa, Artificial Sequence
  Cyclic GFR-binding peptide
  MOD_RES (5)..(6): Xaa is C or S
SAGPXXTPTKMNAISMLYF

SEQ ID NO: 10640 - protein, 20 aa, Artificial Sequence
  Cyclic GFR-binding peptide
  MOD_RES (6)..(7): Xaa is C or S
ASAAPXXVPQALSPISILYK

SEQ ID NO: 10641 - protein, 18 aa, Artificial Sequence
  Cyclic GFR-binding peptide
  MOD_RES (4)..(5): Xaa is C or S
PKPXXAPTQLSATSVLYY

SEQ ID NO: 10642 - protein, 16 aa, Artificial Sequence
  Cyclic GFR-binding peptide
LEPISMLYLDEYDKVV

SEQ ID NO: 10643 - protein, 17 aa, Artificial Sequence
  Cyclic GFR-binding peptide
  MOD_RES (3)..(4): Xaa is C or S
KPXXAPTQLSATSVLYY

SEQ ID NO: 10644 - protein, 15 aa, Artificial Sequence
  Cyclic GFR-binding peptide
SATSILYYVGRTPKV

SEQ ID NO: 10645 - protein, 15 aa, Artificial Sequence
  Cyclic GFR-binding peptide
SPISILYKDENKNVV

SEQ ID NO: 10646 - protein, 17 aa, Artificial Sequence
  Cyclic GFR-binding peptide
ELSATSMLYYDENEKVV

SEQ ID NO: 10647 - protein, 15 aa, Artificial Sequence
  Cyclic GFR-binding peptide
  MOD_RES (1)..(2): Xaa is C or S
XXVPTKLSPINVLYF

SEQ ID NO: 10648 - protein, 18 aa, Artificial Sequence
  Cyclic GFR-binding peptide
QDLEPISILYLIGKTPKI

SEQ ID NO: 10649 - protein, 15 aa, Artificial Sequence
  Cyclic GFR-binding peptide
  MOD_RES (1)..(2): Xaa is C or S
XXVPTRLNAISILYF

SEQ ID NO: 10650 - protein, 27 aa, Artificial Sequence
  Cyclic GFR-binding peptide
  MOD_RES (6)..(7): Xaa is C or S
GIPEPXXVPEKMEPISILYLDENKNVV

SEQ ID NO: 10651 - protein, 19 aa, Artificial Sequence
  Cyclic GFR-binding peptide
  MOD_RES (5)..(6): Xaa is C or S
SASPXXVSQDLEPISILYL

SEQ ID NO: 10652 - protein, 16 aa, Artificial Sequence
  Cyclic GFR-binding peptide
  MOD_RES (2)..(3): Xaa is C or S
AXXVPTKLSATSVLYY

SEQ ID NO: 10653 - protein, 15 aa, Artificial Sequence
  Cyclic GFR-binding peptide
SPINVLYFDDSSNVI

SEQ ID NO: 10654 - protein, 19 aa, Artificial Sequence
  Cyclic GFR-binding peptide
PEKMSPISILYKDENKNVV

SEQ ID NO: 10655 - protein, 17 aa, Artificial Sequence
  Cyclic GFR-binding peptide
  MOD_RES (3)..(4): Xaa is C or S
KPXXAPTKLSPISVLYK

SEQ ID NO: 10656 - protein, 17 aa, Artificial Sequence
  Cyclic GFR-binding peptide
  MOD_RES (3)..(4): Xaa is C or S
KPXXAPTQLSPISVLYK

SEQ ID NO: 10657 - protein, 17 aa, Artificial Sequence
  Cyclic GFR-binding peptide
RLSPINILYFDAANNVV

SEQ ID NO: 10658 - protein, 16 aa, Artificial Sequence
  Cyclic GFR-binding peptide
LSATSVLYYDDMGVPT

SEQ ID NO: 10659 - protein, 16 aa, Artificial Sequence
  Cyclic GFR-binding peptide
LNAISILYFVGRKPKV

SEQ ID NO: 10660 - protein, 14 aa, Artificial Sequence
  Cyclic GFR-binding peptide
  MOD_RES (1)..(1): Xaa is C or S
XVPQDLSATSILYY

SEQ ID NO: 10661 - protein, 14 aa, Artificial Sequence
  Cyclic GFR-binding peptide
  MOD_RES (1)..(1): Xaa is C or S
XVPQALSPISILYK

SEQ ID NO: 10662 - protein, 14 aa, Artificial Sequence
  Cyclic GFR-binding peptide
  MOD_RES (1)..(1): Xaa is C or S
XVPARLNAISILYF

SEQ ID NO: 10663 - protein, 18 aa, Artificial Sequence
  Cyclic GFR-binding peptide
QALSPISILYKVGRKPKV

SEQ ID NO: 10664 - protein, 13 aa, Artificial Sequence
  Cyclic GFR-binding peptide
APVKTEPISMLYL

SEQ ID NO: 10665 - protein, 27 aa, Artificial Sequence
  Cyclic GFR-binding peptide
  MOD_RES (6)..(7): Xaa is C or S
GSAGPXXTPTKMEPISMLYLNDKQQII

SEQ ID NO: 10666 - protein, 27 aa, Artificial Sequence
  Cyclic GFR-binding peptide
  MOD_RES (6)..(7): Xaa is C or S
KASKAXXVPTKLSPISILYKDKGVVTY

SEQ ID NO: 10667 - protein, 17 aa, Artificial Sequence
  Cyclic GFR-binding peptide
  MOD_RES (3)..(4): Xaa is C or S
SPXXVSQDLSPINILYF

SEQ ID NO: 10668 - protein, 16 aa, Artificial Sequence
  Cyclic GFR-binding peptide
  MOD_RES (2)..(3): Xaa is C or S
TXXAPVKTSPISMLYK

SEQ ID NO: 10669 - protein, 18 aa, Artificial Sequence
  Cyclic GFR-binding peptide
  MOD_RES (5)..(5): Xaa is C or S
TKPTXAPTKLSPISVLYK

SEQ ID NO: 10670 - protein, 15 aa, Artificial Sequence
  Cyclic GFR-binding peptide
  MOD_RES (2)..(2): Xaa is C or S
TXAPTKLSPINVLYF

SEQ ID NO: 10671 - protein, 16 aa, Artificial Sequence
  Cyclic GFR-binding peptide
TSATSMLYYDNGRVLL

SEQ ID NO: 10672 - protein, 18 aa, Artificial Sequence
  Cyclic GFR-binding peptide
  MOD_RES (4)..(5): Xaa is C or S
PKPXXAPTKLSPISVLYK

SEQ ID NO: 10673 - protein, 16 aa, Artificial Sequence
  Cyclic GFR-binding peptide
LNAISILYFDSANNVV

SEQ ID NO: 10674 - protein, 15 aa, Artificial Sequence
  Cyclic GFR-binding peptide
NAISMLYFDENEKVV

SEQ ID NO: 10675 - protein, 19 aa, Artificial Sequence
  Cyclic GFR-binding peptide
PTELEPISMLYLDEYDKVV

SEQ ID NO: 10676 - protein, 13 aa, Artificial Sequence
  Cyclic GFR-binding peptide
APTKLSPISVLYK

SEQ ID NO: 10677 - protein, 13 aa, Artificial Sequence
  Cyclic GFR-binding peptide
APVKTNAISMLYF

SEQ ID NO: 10678 - protein, 18 aa, Artificial Sequence
  Cyclic GFR-binding peptide
TKLNAISVLYFDDMGVPT

SEQ ID NO: 10679 - protein, 16 aa, Artificial Sequence
  Cyclic GFR-binding peptide
LSPINILYFVGRKPKV

SEQ ID NO: 10680 - protein, 17 aa, Artificial Sequence
  Cyclic GFR-binding peptide
KLSPISILYKDKGVVTY

SEQ ID NO: 10681 - protein, 15 aa, Artificial Sequence
  Cyclic GFR-binding peptide
EPISVLYLDDMGVPT

SEQ ID NO: 10682 - protein, 20 aa, Artificial Sequence
  Cyclic GFR-binding peptide
  MOD_RES (6)..(7): Xaa is C or S
YVPKPXXAPTKLEPISVLYL

SEQ ID NO: 10683 - protein, 20 aa, Artificial Sequence
  Cyclic GFR-binding peptide
  MOD_RES (6)..(7): Xaa is C or S
ASASPXXVPQDLSPINILYF

SEQ ID NO: 10684 - protein, 13 aa, Artificial Sequence
  Cyclic GFR-binding peptide
VPTKLSATSILYY

SEQ ID NO: 10685 - protein, 15 aa, Artificial Sequence
  Cyclic GFR-binding peptide
SATSMLYYNDKQQII

SEQ ID NO: 10686 - protein, 19 aa, Artificial Sequence
  Cyclic GFR-binding peptide
  MOD_RES (5)..(6): Xaa is C or S
SAAPXXVPQALSPINILYF

SEQ ID NO: 10687 - protein, 27 aa, Artificial Sequence
  Cyclic GFR-binding peptide
  MOD_RES (6)..(7): Xaa is C or S
TVPKPXXAPTQLSPINVLYFDDSSNVI

SEQ ID NO: 10688 - protein, 20 aa, Artificial Sequence
  Cyclic GFR-binding peptide
  MOD_RES (6)..(7): Xaa is C or S
STPPTXXVPTRLSPINILYF

SEQ ID NO: 10689 - protein, 17 aa, Artificial Sequence
  Cyclic GFR-binding peptide
  MOD_RES (3)..(4): Xaa is C or S
STXXAPVKTSPISMLYK

SEQ ID NO: 10690 - protein, 13 aa, Artificial Sequence
  Cyclic GFR-binding peptide
APTQLSATSVLYY

SEQ ID NO: 10691 - protein, 17 aa, Artificial Sequence
  Cyclic GFR-binding peptide
ELSPINMLYFDEYDKVV

SEQ ID NO: 10692 - protein, 15 aa, Artificial Sequence
  Cyclic GFR-binding peptide
SPINILYFDAANNVV

SEQ ID NO: 10693 - protein, 15 aa, Artificial Sequence
  Cyclic GFR-binding peptide
  MOD_RES (1)..(2): Xaa is C or S
XXVPTRLEPISILYL

SEQ ID NO: 10694 - protein, 27 aa, Artificial Sequence
  Cyclic GFR-binding peptide
  MOD_RES (7)..(7): Xaa is C or S
HVTKPTXAPTKLSATSVLYYDDSSNVI

SEQ ID NO: 10695 - protein, 14 aa, Artificial Sequence
  Cyclic GFR-binding peptide
  MOD_RES (1)..(1): Xaa is C or S
XTPTKMSPISMLYK

SEQ ID NO: 10696 - protein, 17 aa, Artificial Sequence
  Cyclic GFR-binding peptide
KMNAISILYFDENKNVV

SEQ ID NO: 10697 - protein, 17 aa, Artificial Sequence
  Cyclic GFR-binding peptide
KLSPISVLYKDSSNNVI

SEQ ID NO: 10698 - protein, 14 aa, Artificial Sequence
  Cyclic GFR-binding peptide
  MOD_RES (1)..(1): Xaa is C or S
XVPEKMSPINILYF

SEQ ID NO: 10699 - protein, 15 aa, Artificial Sequence
  Cyclic GFR-binding peptide
LLVRGNDMIQMTINS

SEQ ID NO: 10700 - protein, 19 aa, Artificial Sequence
  Cyclic GFR-binding peptide
  MOD_RES (14)..(15): Xaa is C or S
MIQITINSLRTPVXXTPPT

SEQ ID NO: 10701 - protein, 13 aa, Artificial Sequence
  Cyclic GFR-binding peptide
MIQITINSLAQPV

SEQ ID NO: 10702 - protein, 20 aa, Artificial Sequence
  Cyclic GFR-binding peptide
HQGQHPKIRMIQMTINSEET

SEQ ID NO: 10703 - protein, 29 aa, Artificial Sequence
  Cyclic GFR-binding peptide
  MOD_RES (23)..(23): Xaa is C or S
HQGQHPKIRMIQMTINSQGTPVXELGEDN

SEQ ID NO: 10704 - protein, 18 aa, Artificial Sequence
  Cyclic GFR-binding peptide
  MOD_RES (16)..(16): Xaa is C or S
MIQVTINSLQVQTPRXQV

SEQ ID NO: 10705 - protein, 27 aa, Artificial Sequence
  Cyclic GFR-binding peptide
  MOD_RES (21)..(22): Xaa is C or S
LLVRGNDMIQMTINSTKVPAXXTSPVR

SEQ ID NO: 10706 - protein, 19 aa, Artificial Sequence
  Cyclic GFR-binding peptide
LKPKKRVYEMIQVTINSHH

SEQ ID NO: 10707 - protein, 14 aa, Artificial Sequence
  Cyclic GFR-binding peptide
  MOD_RES (14)..(14): Xaa is C or S
MIQMTINSMKTPTX

SEQ ID NO: 10708 - protein, 18 aa, Artificial Sequence
  Cyclic GFR-binding peptide
VKPKRGVMIQITINSLAQ

SEQ ID NO: 10709 - protein, 27 aa, Artificial Sequence
  Cyclic GFR-binding peptide
  MOD_RES (21)..(22): Xaa is C or S
VVNNAADMIQITINSLRAPVXXSAPAA

SEQ ID NO: 10710 - protein, 17 aa, Artificial Sequence
  Cyclic GFR-binding peptide
VVNNASDMIQITINSLR

SEQ ID NO: 10711 - protein, 19 aa, Artificial Sequence
  Cyclic GFR-binding peptide
HQGQHPKIRMIQMTINSEE

SEQ ID NO: 10712 - protein, 15 aa, Artificial Sequence
  Cyclic GFR-binding peptide
  MOD_RES (14)..(14): Xaa is C or S
MIQMTINSEETPVXE

SEQ ID NO: 10713 - protein, 16 aa, Artificial Sequence
  Cyclic GFR-binding peptide
VVNNASDMIQITINSL

SEQ ID NO: 10714 - protein, 15 aa, Artificial Sequence
  Cyclic GFR-binding peptide
MIQVTINSLQVQTPR

SEQ ID NO: 10715 - protein, 16 aa, Artificial Sequence
  Cyclic GFR-binding peptide
  MOD_RES (14)..(15): Xaa is C or S
MIQMTINSTKVPAXXT

SEQ ID NO: 10716 - protein, 18 aa, Artificial Sequence
  Cyclic GFR-binding peptide
  MOD_RES (14)..(14): Xaa is C or S
MIQMTINSEETPVXELGE

SEQ ID NO: 10717 - protein, 20 aa, Artificial Sequence
  Cyclic GFR-binding peptide
  MOD_RES (16)..(16): Xaa is C or S
MIQVTINSLQVQTPRXQVNR

SEQ ID NO: 10718 - protein, 15 aa, Artificial Sequence
  Cyclic GFR-binding peptide
  MOD_RES (14)..(15): Xaa is C or S
MIQITINSLDQPVXX

SEQ ID NO: 10719 - protein, 19 aa, Artificial Sequence
  Cyclic GFR-binding peptide
VKPKRGVMIQITINSLAQP

SEQ ID NO: 10720 - protein, 13 aa, Artificial Sequence
  Cyclic GFR-binding peptide
MIQVTINSLKTPA

SEQ ID NO: 10721 - protein, 16 aa, Artificial Sequence
  Cyclic GFR-binding peptide
IIQQKDNMIQMTINSM

SEQ ID NO: 10722 - protein, 20 aa, Artificial Sequence
  Cyclic GFR-binding peptide
  MOD_RES (14)..(15): Xaa is C or S
MIQITINSLAQPVXXPAASA

SEQ ID NO: 10723 - protein, 19 aa, Artificial Sequence
  Cyclic GFR-binding peptide
  MOD_RES (14)..(15): Xaa is C or S
MIQITINSLDQSVXXPSAS

SEQ ID NO: 10724 - protein, 13 aa, Artificial Sequence
  Cyclic GFR-binding peptide
MIQMTINSTKVPA

SEQ ID NO: 10725 - protein, 14 aa, Artificial Sequence
  Cyclic GFR-binding peptide
  MOD_RES (14)..(14): Xaa is C or S
MIQITINSLAQPVX

SEQ ID NO: 10726 - protein, 18 aa, Artificial Sequence
  Cyclic GFR-binding peptide
  MOD_RES (14)..(15): Xaa is C or S
MIQMTINSMKTPTXXPGA

SEQ ID NO: 10727 - protein, 17 aa, Artificial Sequence
  Cyclic GFR-binding peptide
  MOD_RES (14)..(14): Xaa is C or S
MIQMTINSEETPVXELG

SEQ ID NO: 10728 - protein, 13 aa, Artificial Sequence
  Cyclic GFR-binding peptide
MIQVTINSLQVQT

SEQ ID NO: 10729 - protein, 16 aa, Artificial Sequence
  Cyclic GFR-binding peptide
  MOD_RES (14)..(15): Xaa is C or S
MIQMTINSMKTPTXXP

SEQ ID NO: 10730 - protein, 21 aa, Artificial Sequence
  Cyclic GFR-binding peptide
LKPKKRVYEMIQVTINSHHVR

SEQ ID NO: 10731 - protein, 17 aa, Artificial Sequence
  Cyclic GFR-binding peptide
IVNSSDDMIQVTINSLK

SEQ ID NO: 10732 - protein, 19 aa, Artificial Sequence
  Cyclic GFR-binding peptide
IKPTKGIMIQITINSLDQS

SEQ ID NO: 10733 - protein, 17 aa, Artificial Sequence
  Cyclic GFR-binding peptide
HQGQHPKIRMIQMTINS

SEQ ID NO: 10734 - protein, 16 aa, Artificial Sequence
  Cyclic GFR-binding peptide
VKPKRGVMIQITINSL

SEQ ID NO: 10735 - protein, 15 aa, Artificial Sequence
  Cyclic GFR-binding peptide
  MOD_RES (14)..(15): Xaa is C or S
MIQITINSLRAPVXX

SEQ ID NO: 10736 - protein, 20 aa, Artificial Sequence
  Cyclic GFR-binding peptide
  MOD_RES (14)..(14): Xaa is C or S
MIQMTINSEETPVXELGEDN

SEQ ID NO: 10737 - protein, 17 aa, Artificial Sequence
  Cyclic GFR-binding peptide
LKPKKRVYEMIQVTINS

SEQ ID NO: 10738 - protein, 29 aa, Artificial Sequence
  Cyclic GFR-binding peptide
  MOD_RES (23)..(23): Xaa is C or S
HQGQHPKIRMIQMTINSEETPVXELGEDN

SEQ ID NO: 10739 - protein, 17 aa, Artificial Sequence
  Cyclic GFR-binding peptide
  MOD_RES (16)..(16): Xaa is C or S
MIQVTINSHHVRSPQXK

SEQ ID NO: 10740 - protein, 16 aa, Artificial Sequence
  Cyclic GFR-binding peptide
  MOD_RES (16)..(16): Xaa is C or S
MIQVTINSLQVQTPRX

SEQ ID NO: 10741 - protein, 14 aa, Artificial Sequence
  Cyclic GFR-binding peptide
MIQVTINSHHVRSP

SEQ ID NO: 10742 - protein, 18 aa, Artificial Sequence
  Cyclic GFR-binding peptide
IVNSSDDMIQVTINSLKT

SEQ ID NO: 10743 - protein, 16 aa, Artificial Sequence
  Cyclic GFR-binding peptide
  MOD_RES (14)..(15): Xaa is C or S
MIQITINSLDQSVXXP

SEQ ID NO: 10744 - protein, 18 aa, Artificial Sequence
  Cyclic GFR-binding peptide
LLVRGNDMIQMTINSTKV

SEQ ID NO: 10745 - protein, 13 aa, Artificial Sequence
  Cyclic GFR-binding peptide
MIQITINSLRTPV

SEQ ID NO: 10746 - protein, 15 aa, Artificial Sequence
  Cyclic GFR-binding peptide
  MOD_RES (14)..(15): Xaa is C or S
MIQMTINSMKTPTXX

SEQ ID NO: 10747 - protein, 16 aa, Artificial Sequence
  Cyclic GFR-binding peptide
  MOD_RES (14)..(15): Xaa is C or S
MIQITINSLRAPVXXS

SEQ ID NO: 10748 - protein, 19 aa, Artificial Sequence
  Cyclic GFR-binding peptide
HQGQHPKIRMIQMTINSQG

SEQ ID NO: 10749 - protein, 15 aa, Artificial Sequence
  Cyclic GFR-binding peptide
VVNNAADMIQITINS

SEQ ID NO: 10750 - protein, 15 aa, Artificial Sequence
  Cyclic GFR-binding peptide
VKPKRGVMIQITINS

SEQ ID NO: 10751 - protein, 15 aa, Artificial Sequence
  Cyclic GFR-binding peptide
  MOD_RES (14)..(15): Xaa is C or S
MIQMTINSTKVPAXX

SEQ ID NO: 10752 - protein, 27 aa, Artificial Sequence
  Cyclic GFR-binding peptide
  MOD_RES (21)..(22): Xaa is C or S
VKPTRGVMIQITINSLDQPVXXPSASA

SEQ ID NO: 10753 - protein, 17 aa, Artificial Sequence
  Cyclic GFR-binding peptide
VKPKRGVMIQITINSLA

SEQ ID NO: 10754 - protein, 19 aa, Artificial Sequence
  Cyclic GFR-binding peptide
  MOD_RES (14)..(15): Xaa is C or S
MIQITINSLDQPVXXPSAS

SEQ ID NO: 10755 - protein, 15 aa, Artificial Sequence
  Cyclic GFR-binding peptide
VVNNASDMIQITINS

SEQ ID NO: 10756 - protein, 16 aa, Artificial Sequence
  Cyclic GFR-binding peptide
  MOD_RES (14)..(15): Xaa is C or S
MIQITINSLRTPVXXT

SEQ ID NO: 10757 - protein, 18 aa, Artificial Sequence
  Cyclic GFR-binding peptide
VVNNASDMIQITINSLRT

SEQ ID NO: 10758 - protein, 16 aa, Artificial Sequence
  Cyclic GFR-binding peptide
  MOD_RES (14)..(14): Xaa is C or S
MIQMTINSEETPVXEL

SEQ ID NO: 10759 - protein, 16 aa, Artificial Sequence
  Cyclic GFR-binding peptide
IKPTKGIMIQITINSL

SEQ ID NO: 10760 - protein, 15 aa, Artificial Sequence
  Cyclic GFR-binding peptide
  MOD_RES (14)..(15): Xaa is C or S
MIQITINSLRTPVXX

SEQ ID NO: 10761 - protein, 19 aa, Artificial Sequence
  Cyclic GFR-binding peptide
FIPKKRVIEMIQVTINSLQ

SEQ ID NO: 10762 - protein, 13 aa, Artificial Sequence
  Cyclic GFR-binding peptide
MIQVTINSHHVRS

SEQ ID NO: 10763 - protein, 14 aa, Artificial Sequence
  Cyclic GFR-binding peptide
  MOD_RES (14)..(14): Xaa is C or S
MIQMTINSEETPVX

SEQ ID NO: 10764 - protein, 19 aa, Artificial Sequence
  Cyclic GFR-binding peptide
VKPTRGVMIQITINSLDQP

SEQ ID NO: 10765 - protein, 27 aa, Artificial Sequence
  Cyclic GFR-binding peptide
  MOD_RES (21)..(22): Xaa is C or S
IVNSSDDMIQVTINSLKTPAXXPKPVH

SEQ ID NO: 10766 - protein, 18 aa, Artificial Sequence
  Cyclic GFR-binding peptide
  MOD_RES (14)..(15): Xaa is C or S
MIQITINSLRTPVXXTPP

SEQ ID NO: 10767 - protein, 17 aa, Artificial Sequence
  Cyclic GFR-binding peptide
  MOD_RES (14)..(15): Xaa is C or S
MIQMTINSMKTPTXXPG

SEQ ID NO: 10768 - protein, 15 aa, Artificial Sequence
  Cyclic GFR-binding peptide
MIQVTINSHHVRSPQ

SEQ ID NO: 10769 - protein, 18 aa, Artificial Sequence
  Cyclic GFR-binding peptide
HQGQHPKIRMIQMTINSE

SEQ ID NO: 10770 - protein, 13 aa, Artificial Sequence
  Cyclic GFR-binding peptide
MIQMTINSMKTPT

SEQ ID NO: 10771 - protein, 14 aa, Artificial Sequence
  Cyclic GFR-binding peptide
  MOD_RES (14)..(14): Xaa is C or S
MIQITINSLDQPVX

SEQ ID NO: 10772 - protein, 18 aa, Artificial Sequence
  Cyclic GFR-binding peptide
VVNNAADMIQITINSLRA

SEQ ID NO: 10773 - protein, 14 aa, Artificial Sequence
  Cyclic GFR-binding peptide
  MOD_RES (14)..(14): Xaa is C or S
MIQMTINSQGTPVX

SEQ ID NO: 10774 - protein, 19 aa, Artificial Sequence
  Cyclic GFR-binding peptide
IIQQKDNMIQMTINSMKTP

SEQ ID NO: 10775 - protein, 16 aa, Artificial Sequence
  Cyclic GFR-binding peptide
  MOD_RES (14)..(15): Xaa is C or S
MIQVTINSLKTPAXXP

SEQ ID NO: 10776 - protein, 20 aa, Artificial Sequence
  Cyclic GFR-binding peptide
  MOD_RES (16)..(16): Xaa is C or S
MIQVTINSHHVRSPQXKVSS

SEQ ID NO: 10777 - protein, 20 aa, Artificial Sequence
  Cyclic GFR-binding peptide
LKPKKRVYEMIQVTINSHHV

SEQ ID NO: 10778 - protein, 18 aa, Artificial Sequence
  Cyclic GFR-binding peptide
FIPKKRVIEMIQVTINSL

SEQ ID NO: 10779 - protein, 15 aa, Artificial Sequence
  Cyclic GFR-binding peptide
  MOD_RES (14)..(15): Xaa is C or S
MIQVTINSLKTPAXX

SEQ ID NO: 10780 - protein, 18 aa, Artificial Sequence
  Cyclic GFR-binding peptide
IKPTKGIMIQITINSLDQ

SEQ ID NO: 10781 - protein, 19 aa, Artificial Sequence
  Cyclic GFR-binding peptide
  MOD_RES (14)..(15): Xaa is C or S
MIQMTINSTKVPAXXTSPV

SEQ ID NO: 10782 - protein, 16 aa, Artificial Sequence
  Cyclic GFR-binding peptide
VKPTRGVMIQITINSL

SEQ ID NO: 10783 - protein, 13 aa, Artificial Sequence
  Cyclic GFR-binding peptide
MIQITINSLDQPV

SEQ ID NO: 10784 - protein, 20 aa, Artificial Sequence
  Cyclic GFR-binding peptide
  MOD_RES (14)..(14): Xaa is C or S
MIQMTINSQGTPVXELGEDN

SEQ ID NO: 10785 - protein, 18 aa, Artificial Sequence
  Cyclic GFR-binding peptide
  MOD_RES (14)..(15): Xaa is C or S
MIQITINSLAQPVXXPAA

SEQ ID NO: 10786 - protein, 17 aa, Artificial Sequence
  Cyclic GFR-binding peptide
  MOD_RES (14)..(15): Xaa is C or S
MIQITINSLRAPVXXSA

SEQ ID NO: 10787 - protein, 21 aa, Artificial Sequence
  Cyclic GFR-binding peptide
HQGQHPKIRMIQMTINSEETP

SEQ ID NO: 10788 - protein, 18 aa, Artificial Sequence
  Cyclic GFR-binding peptide
  MOD_RES (14)..(14): Xaa is C or S
MIQMTINSQGTPVXELGE

SEQ ID NO: 10789 - protein, 29 aa, Artificial Sequence
  Cyclic GFR-binding peptide
  MOD_RES (25)..(25): Xaa is C or S
FIPKKRVIEMIQVTINSLQVQTPRXQVNR

SEQ ID NO: 10790 - protein, 13 aa, Artificial Sequence
  Cyclic GFR-binding peptide
MIQITINSLDQSV

SEQ ID NO: 10791 - protein, 18 aa, Artificial Sequence
  Cyclic GFR-binding peptide
  MOD_RES (14)..(15): Xaa is C or S
MIQMTINSTKVPAXXTSP

SEQ ID NO: 10792 - protein, 17 aa, Artificial Sequence
  Cyclic GFR-binding peptide
VVNNAADMIQITINSLR

SEQ ID NO: 10793 - protein, 15 aa, Artificial Sequence
  Cyclic GFR-binding peptide
IVNSSDDMIQVTINS

SEQ ID NO: 10794 - protein, 18 aa, Artificial Sequence
  Cyclic GFR-binding peptide
  MOD_RES (16)..(16): Xaa is C or S
MIQVTINSHHVRSPQXKV

SEQ ID NO: 10795 - protein, 14 aa, Artificial Sequence
  Cyclic GFR-binding peptide
MIQVTINSLQVQTP

SEQ ID NO: 10796 - protein, 17 aa, Artificial Sequence
  Cyclic GFR-binding peptide
  MOD_RES (14)..(15): Xaa is C or S
MIQITINSLAQPVXXPA

SEQ ID NO: 10797 - protein, 17 aa, Artificial Sequence
  Cyclic GFR-binding peptide
  MOD_RES (14)..(15): Xaa is C or S
MIQITINSLDQSVXXPS

SEQ ID NO: 10798 - protein, 17 aa, Artificial Sequence
  Cyclic GFR-binding peptide
  MOD_RES (14)..(15): Xaa is C or S
MIQMTINSTKVPAXXTS

SEQ ID NO: 10799 - protein, 20 aa, Artificial Sequence
  Cyclic GFR-binding peptide
  MOD_RES (14)..(15): Xaa is C or S
MIQMTINSTKVPAXXTSPVR

SEQ ID NO: 10800 - protein, 17 aa, Artificial Sequence
  Cyclic GFR-binding peptide
IIQQKDNMIQMTINSMK

SEQ ID NO: 10801 - protein, 19 aa, Artificial Sequence
  Cyclic GFR-binding peptide
VVNNAADMIQITINSLRAP

SEQ ID NO: 10802 - protein, 18 aa, Artificial Sequence
  Cyclic GFR-binding peptide
  MOD_RES (14)..(15): Xaa is C or S
MIQITINSLDQSVXXPSA

SEQ ID NO: 10803 - protein, 15 aa, Artificial Sequence
  Cyclic GFR-binding peptide
  MOD_RES (14)..(15): Xaa is C or S
MIQITINSLAQPVXX

SEQ ID NO: 10804 - protein, 19 aa, Artificial Sequence
  Cyclic GFR-binding peptide
VVNNASDMIQITINSLRTP

SEQ ID NO: 10805 - protein, 27 aa, Artificial Sequence
  Cyclic GFR-binding peptide
  MOD_RES (21)..(22): Xaa is C or S
IIQQKDNMIQMTINSMKTPTXXPGASG

SEQ ID NO: 10806 - protein, 20 aa, Artificial Sequence
  Cyclic GFR-binding peptide
  MOD_RES (14)..(15): Xaa is C or S
MIQMTINSMKTPTXXPGASG

SEQ ID NO: 10807 - protein, 14 aa, Artificial Sequence
  Cyclic GFR-binding peptide
  MOD_RES (14)..(14): Xaa is C or S
MIQITINSLRTPVX

SEQ ID NO: 10808 - protein, 18 aa, Artificial Sequence
  Cyclic GFR-binding peptide
  MOD_RES (14)..(15): Xaa is C or S
MIQVTINSLKTPAXXPKP

SEQ ID NO: 10809 - protein, 18 aa, Artificial Sequence
  Cyclic GFR-binding peptide
  MOD_RES (14)..(15): Xaa is C or S
MIQITINSLDQPVXXPSA

SEQ ID NO: 10810 - protein, 17 aa, Artificial Sequence
  Cyclic GFR-binding peptide
  MOD_RES (14)..(14): Xaa is C or S
MIQMTINSQGTPVXELG

SEQ ID NO: 10811 - protein, 14 aa, Artificial Sequence
  Cyclic GFR-binding peptide
  MOD_RES (14)..(14): Xaa is C or S
MIQITINSLDQSVX

SEQ ID NO: 10812 - protein, 19 aa, Artificial Sequence
  Cyclic GFR-binding peptide
  MOD_RES (14)..(15): Xaa is C or S
MIQITINSLRAPVXXSAPA

SEQ ID NO: 10813 - protein, 16 aa, Artificial Sequence
  Cyclic GFR-binding peptide
  MOD_RES (14)..(14): Xaa is C or S
MIQMTINSQGTPVXEL

SEQ ID NO: 10814 - protein, 16 aa, Artificial Sequence
  Cyclic GFR-binding peptide
IVNSSDDMIQVTINSL

SEQ ID NO: 10815 - protein, 27 aa, Artificial Sequence
  Cyclic GFR-binding peptide
  MOD_RES (21)..(22): Xaa is C or S
VKPKRGVMIQITINSLAQPVXXPAASA

SEQ ID NO: 10816 - protein, 17 aa, Artificial Sequence
  Cyclic GFR-binding peptide
  MOD_RES (16)..(16): Xaa is C or S
MIQVTINSLQVQTPRXQ

SEQ ID NO: 10817 - protein, 13 aa, Artificial Sequence
  Cyclic GFR-binding peptide
MIQITINSLRAPV

SEQ ID NO: 10818 - protein, 20 aa, Artificial Sequence
  Cyclic GFR-binding peptide
FIPKKRVIEMIQVTINSLQV

SEQ ID NO: 10819 - protein, 20 aa, Artificial Sequence
  Cyclic GFR-binding peptide
  MOD_RES (14)..(15): Xaa is C or S
MIQVTINSLKTPAXXPKPVH

SEQ ID NO: 10820 - protein, 18 aa, Artificial Sequence
  Cyclic GFR-binding peptide
HQGQHPKIRMIQMTINSQ

SEQ ID NO: 10821 - protein, 17 aa, Artificial Sequence
  Cyclic GFR-binding peptide
  MOD_RES (14)..(15): Xaa is C or S
MIQITINSLRTPVXXTP

SEQ ID NO: 10822 - protein, 13 aa, Artificial Sequence
  Cyclic GFR-binding peptide
MIQMTINSEETPV

SEQ ID NO: 10823 - protein, 13 aa, Artificial Sequence
  Cyclic GFR-binding peptide
MIQMTINSQGTPV

SEQ ID NO: 10824 - protein, 27 aa, Artificial Sequence
  Cyclic GFR-binding peptide
  MOD_RES (21)..(22): Xaa is C or S
IKPTKGIMIQITINSLDQSVXXPSASA

SEQ ID NO: 10825 - protein, 20 aa, Artificial Sequence
  Cyclic GFR-binding peptide
  MOD_RES (14)..(15): Xaa is C or S
MIQITINSLDQPVXXPSASA

SEQ ID NO: 10826 - protein, 19 aa, Artificial Sequence
  Cyclic GFR-binding peptide
  MOD_RES (14)..(14): Xaa is C or S
MIQMTINSQGTPVXELGED

SEQ ID NO: 10827 - protein, 19 aa, Artificial Sequence
  Cyclic GFR-binding peptide
  MOD_RES (14)..(15): Xaa is C or S
MIQVTINSLKTPAXXPKPV

SEQ ID NO: 10828 - protein, 18 aa, Artificial Sequence
  Cyclic GFR-binding peptide
IIQQKDNMIQMTINSMKT

SEQ ID NO: 10829 - protein, 19 aa, Artificial Sequence
  Cyclic GFR-binding peptide
  MOD_RES (14)..(15): Xaa is C or S
MIQITINSLAQPVXXPAAS

SEQ ID NO: 10830 - protein, 20 aa, Artificial Sequence
  Cyclic GFR-binding peptide
HQGQHPKIRMIQMTINSQGT

SEQ ID NO: 10831 - protein, 18 aa, Artificial Sequence
  Cyclic GFR-binding peptide
VKPTRGVMIQITINSLDQ

SEQ ID NO: 10832 - protein, 17 aa, Artificial Sequence
  Cyclic GFR-binding peptide
  MOD_RES (14)..(15): Xaa is C or S
MIQVTINSLKTPAXXPK

SEQ ID NO: 10833 - protein, 16 aa, Artificial Sequence
  Cyclic GFR-binding peptide
  MOD_RES (14)..(15): Xaa is C or S
MIQITINSLAQPVXXP

SEQ ID NO: 10834 - protein, 16 aa, Artificial Sequence
  Cyclic GFR-binding peptide
LLVRGNDMIQMTINST

SEQ ID NO: 10835 - protein, 21 aa, Artificial Sequence
  Cyclic GFR-binding peptide
HQGQHPKIRMIQMTINSQGTP

SEQ ID NO: 10836 - protein, 20 aa, Artificial Sequence
  Cyclic GFR-binding peptide
  MOD_RES (14)..(15): Xaa is C or S
MIQITINSLRTPVXXTPPTS

SEQ ID NO: 10837 - protein, 27 aa, Artificial Sequence
  Cyclic GFR-binding peptide
  MOD_RES (21)..(22): Xaa is C or S
VVNNASDMIQITINSLRTPVXXTPPTS

SEQ ID NO: 10838 - protein, 19 aa, Artificial Sequence
  Cyclic GFR-binding peptide
IVNSSDDMIQVTINSLKTP

SEQ ID NO: 10839 - protein, 15 aa, Artificial Sequence
  Cyclic GFR-binding peptide
IKPTKGIMIQITINS

SEQ ID NO: 10840 - protein, 14 aa, Artificial Sequence
  Cyclic GFR-binding peptide
  MOD_RES (14)..(14): Xaa is C or S
MIQITINSLRAPVX

SEQ ID NO: 10841 - protein, 16 aa, Artificial Sequence
  Cyclic GFR-binding peptide
  MOD_RES (14)..(15): Xaa is C or S
MIQITINSLDQPVXXP

SEQ ID NO: 10842 - protein, 14 aa, Artificial Sequence
  Cyclic GFR-binding peptide
  MOD_RES (14)..(14): Xaa is C or S
MIQVTINSLKTPAX

SEQ ID NO: 10843 - protein, 19 aa, Artificial Sequence
  Cyclic GFR-binding peptide
  MOD_RES (14)..(14): Xaa is C or S
MIQMTINSEETPVXELGED

SEQ ID NO: 10844 - protein, 15 aa, Artificial Sequence
  Cyclic GFR-binding peptide
IIQQKDNMIQMTINS

SEQ ID NO: 10845 - protein, 20 aa, Artificial Sequence
  Cyclic GFR-binding peptide
  MOD_RES (14)..(15): Xaa is C or S
MIQITINSLDQSVXXPSASA

SEQ ID NO: 10846 - protein, 19 aa, Artificial Sequence
  Cyclic GFR-binding peptide
  MOD_RES (16)..(16): Xaa is C or S
MIQVTINSHHVRSPQXKVS

SEQ ID NO: 10847 - protein, 18 aa, Artificial Sequence
  Cyclic GFR-binding peptide
  MOD_RES (14)..(15): Xaa is C or S
MIQITINSLRAPVXXSAP

SEQ ID NO: 10848 - protein, 19 aa, Artificial Sequence
  Cyclic GFR-binding peptide
  MOD_RES (14)..(15): Xaa is C or S
MIQMTINSMKTPTXXPGAS

SEQ ID NO: 10849 - protein, 17 aa, Artificial Sequence
  Cyclic GFR-binding peptide
VKPTRGVMIQITINSLD

SEQ ID NO: 10850 - protein, 19 aa, Artificial Sequence
  Cyclic GFR-binding peptide
  MOD_RES (16)..(16): Xaa is C or S
MIQVTINSLQVQTPRXQVN

SEQ ID NO: 10851 - protein, 15 aa, Artificial Sequence
  Cyclic GFR-binding peptide
  MOD_RES (14)..(15): Xaa is C or S
MIQITINSLDQSVXX

SEQ ID NO: 10852 - protein, 15 aa, Artificial Sequence
  Cyclic GFR-binding peptide
VKPTRGVMIQITINS

SEQ ID NO: 10853 - protein, 16 aa, Artificial Sequence
  Cyclic GFR-binding peptide
  MOD_RES (16)..(16): Xaa is C or S
MIQVTINSHHVRSPQX

SEQ ID NO: 10854 - protein, 29 aa, Artificial Sequence
  Cyclic GFR-binding peptide
  MOD_RES (25)..(25): Xaa is C or S
LKPKKRVYEMIQVTINSHHVRSPQXKVSS

SEQ ID NO: 10855 - protein, 16 aa, Artificial Sequence
  Cyclic GFR-binding peptide
VVNNAADMIQITINSL

SEQ ID NO: 10856 - protein, 19 aa, Artificial Sequence
  Cyclic GFR-binding peptide
LLVRGNDMIQMTINSTKVP

SEQ ID NO: 10857 - protein, 15 aa, Artificial Sequence
  Cyclic GFR-binding peptide
  MOD_RES (14)..(14): Xaa is C or S
MIQMTINSQGTPVXE

SEQ ID NO: 10858 - protein, 17 aa, Artificial Sequence
  Cyclic GFR-binding peptide
  MOD_RES (14)..(15): Xaa is C or S
MIQITINSLDQPVXXPS

SEQ ID NO: 10859 - protein, 20 aa, Artificial Sequence
  Cyclic GFR-binding peptide
  MOD_RES (14)..(15): Xaa is C or S
MIQITINSLRAPVXXSAPAA

SEQ ID NO: 10860 - protein, 14 aa, Artificial Sequence
  Cyclic GFR-binding peptide
  MOD_RES (14)..(14): Xaa is C or S
MIQMTINSTKVPAX

SEQ ID NO: 10861 - protein, 21 aa, Artificial Sequence
  Cyclic GFR-binding peptide
FIPKKRVIEMIQVTINSLQVQ

SEQ ID NO: 10862 - protein, 17 aa, Artificial Sequence
  Cyclic GFR-binding peptide
IKPTKGIMIQITINSLD

SEQ ID NO: 10863 - protein, 18 aa, Artificial Sequence
  Cyclic GFR-binding peptide
LKPKKRVYEMIQVTINSH

SEQ ID NO: 10864 - protein, 17 aa, Artificial Sequence
  Cyclic GFR-binding peptide
FIPKKRVIEMIQVTINS

SEQ ID NO: 10865 - protein, 17 aa, Artificial Sequence
  Cyclic GFR-binding peptide
LLVRGNDMIQMTINSTK

SEQ ID NO: 10866 - protein, 15 aa, Artificial Sequence
  Cyclic GFR-binding peptide
SNITMQIMDNGRVLL

SEQ ID NO: 10867 - protein, 19 aa, Artificial Sequence
  Cyclic GFR-binding peptide
  MOD_RES (5)..(6): Xaa is C or S
TPPTXXVPTRLSNITIQIM

SEQ ID NO: 10868 - protein, 13 aa, Artificial Sequence
  Cyclic GFR-binding peptide
VPQALSNITIQIM

SEQ ID NO: 10869 - protein, 18 aa, Artificial Sequence
  Cyclic GFR-binding peptide
  MOD_RES (3)..(3): Xaa is C or S
VQXRPTQVQLSNITVQIM

SEQ ID NO: 10870 - protein, 27 aa, Artificial Sequence
  Cyclic GFR-binding peptide
  MOD_RES (6)..(7): Xaa is C or S
RVPSTXXAPVKTSNITMQIMDNGRVLL

SEQ ID NO: 10871 - protein, 19 aa, Artificial Sequence
  Cyclic GFR-binding peptide
HHSNITVQIMEYVRKKPKL

SEQ ID NO: 10872 - protein, 14 aa, Artificial Sequence
  Cyclic GFR-binding peptide
  MOD_RES (1)..(1): Xaa is C or S
XTPTKMSNITMQIM

SEQ ID NO: 10873 - protein, 18 aa, Artificial Sequence
  Cyclic GFR-binding peptide
QALSNITIQIMVGRKPKV

SEQ ID NO: 10874 - protein, 27 aa, Artificial Sequence
  Cyclic GFR-binding peptide
  MOD_RES (6)..(7): Xaa is C or S
AAPASXXVPARLSNITIQIMDAANNVV

SEQ ID NO: 10875 - protein, 17 aa, Artificial Sequence
  Cyclic GFR-binding peptide
RLSNITIQIMDSANNVV

SEQ ID NO: 10876 - protein, 16 aa, Artificial Sequence
  Cyclic GFR-binding peptide
LSNITIQIMDSANNVV

SEQ ID NO: 10877 - protein, 15 aa, Artificial Sequence
  Cyclic GFR-binding peptide
RPTQVQLSNITVQIM

SEQ ID NO: 10878 - protein, 16 aa, Artificial Sequence
  Cyclic GFR-binding peptide
  MOD_RES (2)..(3): Xaa is C or S
TXXAPVKTSNITMQIM

SEQ ID NO: 10879 - protein, 20 aa, Artificial Sequence
  Cyclic GFR-binding peptide
  MOD_RES (5)..(5): Xaa is C or S
RNVQXRPTQVQLSNITVQIM

SEQ ID NO: 10880 - protein, 15 aa, Artificial Sequence
  Cyclic GFR-binding peptide
  MOD_RES (1)..(2): Xaa is C or S
XXVPQDLSNITIQIM

SEQ ID NO: 10881 - protein, 19 aa, Artificial Sequence
  Cyclic GFR-binding peptide
PQALSNITIQIMVGRKPKV

SEQ ID NO: 10882 - protein, 13 aa, Artificial Sequence
  Cyclic GFR-binding peptide
APTKLSNITVQIM

SEQ ID NO: 10883 - protein, 16 aa, Artificial Sequence
  Cyclic GFR-binding peptide
MSNITMQIMNDKQQII

SEQ ID NO: 10884 - protein, 20 aa, Artificial Sequence
  Cyclic GFR-binding peptide
  MOD_RES (6)..(7): Xaa is C or S
ASAAPXXVPQALSNITIQIM

SEQ ID NO: 10885 - protein, 19 aa, Artificial Sequence
  Cyclic GFR-binding peptide
  MOD_RES (5)..(6): Xaa is C or S
SASPXXVSQDLSNITIQIM

SEQ ID NO: 10886 - protein, 13 aa, Artificial Sequence
  Cyclic GFR-binding peptide
APVKTSNITMQIM

SEQ ID NO: 10887 - protein, 14 aa, Artificial Sequence
  Cyclic GFR-binding peptide
  MOD_RES (1)..(1): Xaa is C or S
XVPQALSNITIQIM

SEQ ID NO: 10888 - protein, 18 aa, Artificial Sequence
  Cyclic GFR-binding peptide
  MOD_RES (4)..(5): Xaa is C or S
AGPXXTPTKMSNITMQIM

SEQ ID NO: 10889 - protein, 13 aa, Artificial Sequence
  Cyclic GFR-binding peptide
TQVQLSNITVQIM

SEQ ID NO: 10890 - protein, 16 aa, Artificial Sequence
  Cyclic GFR-binding peptide
  MOD_RES (2)..(3): Xaa is C or S
PXXTPTKMSNITMQIM

SEQ ID NO: 10891 - protein, 21 aa, Artificial Sequence
  Cyclic GFR-binding peptide
RVHHSNITVQIMEYVRKKPKL

SEQ ID NO: 10892 - protein, 17 aa, Artificial Sequence
  Cyclic GFR-binding peptide
KLSNITVQIMDDSSNVI

SEQ ID NO: 10893 - protein, 19 aa, Artificial Sequence
  Cyclic GFR-binding peptide
SQDLSNITIQIMIGKTPKI

SEQ ID NO: 10894 - protein, 16 aa, Artificial Sequence
  Cyclic GFR-binding peptide
LSNITIQIMVGRKPKV

SEQ ID NO: 10895 - protein, 15 aa, Artificial Sequence
  Cyclic GFR-binding peptide
  MOD_RES (1)..(2): Xaa is C or S
XXVPARLSNITIQIM

SEQ ID NO: 10896 - protein, 17 aa, Artificial Sequence
  Cyclic GFR-binding peptide
SNITVQIMEYVRKKPKL

SEQ ID NO: 10897 - protein, 17 aa, Artificial Sequence
  Cyclic GFR-binding peptide
  MOD_RES (2)..(2): Xaa is C or S
KXQPSRVHHSNITVQIM

SEQ ID NO: 10898 - protein, 16 aa, Artificial Sequence
  Cyclic GFR-binding peptide
  MOD_RES (1)..(1): Xaa is C or S
XRPTQVQLSNITVQIM

SEQ ID NO: 10899 - protein, 14 aa, Artificial Sequence
  Cyclic GFR-binding peptide
PSRVHHSNITVQIM

SEQ ID NO: 10900 - protein, 18 aa, Artificial Sequence
  Cyclic GFR-binding peptide
TKLSNITVQIMDDSSNVI

SEQ ID NO: 10901 - protein, 16 aa, Artificial Sequence
  Cyclic GFR-binding peptide
  MOD_RES (2)..(3): Xaa is C or S
PXXVSQDLSNITIQIM

SEQ ID NO: 10902 - protein, 18 aa, Artificial Sequence
  Cyclic GFR-binding peptide
VKTSNITMQIMDNGRVLL

SEQ ID NO: 10903 - protein, 13 aa, Artificial Sequence
  Cyclic GFR-binding peptide
VPTRLSNITIQIM

SEQ ID NO: 10904 - protein, 15 aa, Artificial Sequence
  Cyclic GFR-binding peptide
  MOD_RES (1)..(2): Xaa is C or S
XXTPTKMSNITMQIM

SEQ ID NO: 10905 - protein, 16 aa, Artificial Sequence
  Cyclic GFR-binding peptide
  MOD_RES (2)..(3): Xaa is C or S
SXXVPARLSNITIQIM

SEQ ID NO: 10906 - protein, 15 aa, Artificial Sequence
  Cyclic GFR-binding peptide
SNITIQIMDAANNVV

SEQ ID NO: 10907 - protein, 15 aa, Artificial Sequence
  Cyclic GFR-binding peptide
SNITIQIMVGRKPKV

SEQ ID NO: 10908 - protein, 15 aa, Artificial Sequence
  Cyclic GFR-binding peptide
  MOD_RES (1)..(2): Xaa is C or S
XXAPVKTSNITMQIM

SEQ ID NO: 10909 - protein, 27 aa, Artificial Sequence
  Cyclic GFR-binding peptide
  MOD_RES (6)..(7): Xaa is C or S
ASASPXXVPQDLSNITIQIMVGRTPKV

SEQ ID NO: 10910 - protein, 17 aa, Artificial Sequence
  Cyclic GFR-binding peptide
ALSNITIQIMVGRKPKV

SEQ ID NO: 10911 - protein, 19 aa, Artificial Sequence
  Cyclic GFR-binding peptide
  MOD_RES (5)..(6): Xaa is C or S
SASPXXVPQDLSNITIQIM

SEQ ID NO: 10912 - protein, 15 aa, Artificial Sequence
  Cyclic GFR-binding peptide
SNITIQIMDSANNVV

SEQ ID NO: 10913 - protein, 16 aa, Artificial Sequence
  Cyclic GFR-binding peptide
  MOD_RES (2)..(3): Xaa is C or S
TXXVPTRLSNITIQIM

SEQ ID NO: 10914 - protein, 18 aa, Artificial Sequence
  Cyclic GFR-binding peptide
TRLSNITIQIMDSANNVV

SEQ ID NO: 10915 - protein, 16 aa, Artificial Sequence
  Cyclic GFR-binding peptide
LSNITIQIMIGKTPKI

SEQ ID NO: 10916 - protein, 15 aa, Artificial Sequence
  Cyclic GFR-binding peptide
  MOD_RES (1)..(2): Xaa is C or S
XXVPTRLSNITIQIM

SEQ ID NO: 10917 - protein, 19 aa, Artificial Sequence
  Cyclic GFR-binding peptide
QLSNITVQIMEIVRKKPIF

SEQ ID NO: 10918 - protein, 13 aa, Artificial Sequence
  Cyclic GFR-binding peptide
SRVHHSNITVQIM

SEQ ID NO: 10919 - protein, 19 aa, Artificial Sequence
  Cyclic GFR-binding peptide
PQDLSNITIQIMVGRTPKV

SEQ ID NO: 10920 - protein, 27 aa, Artificial Sequence
  Cyclic GFR-binding peptide
  MOD_RES (6)..(7): Xaa is C or S
HVPKPXXAPTKLSNITVQIMDDSSNVI

SEQ ID NO: 10921 - protein, 18 aa, Artificial Sequence
  Cyclic GFR-binding peptide
  MOD_RES (4)..(5): Xaa is C or S
PPTXXVPTRLSNITIQIM

SEQ ID NO: 10922 - protein, 17 aa, Artificial Sequence
  Cyclic GFR-binding peptide
  MOD_RES (3)..(4): Xaa is C or S
GPXXTPTKMSNITMQIM

SEQ ID NO: 10923 - protein, 15 aa, Artificial Sequence
  Cyclic GFR-binding peptide
QPSRVHHSNITVQIM

SEQ ID NO: 10924 - protein, 13 aa, Artificial Sequence
  Cyclic GFR-binding peptide
TPTKMSNITMQIM

SEQ ID NO: 10925 - protein, 14 aa, Artificial Sequence
  Cyclic GFR-binding peptide
  MOD_RES (1)..(1): Xaa is C or S
XVPQDLSNITIQIM

SEQ ID NO: 10926 - protein, 18 aa, Artificial Sequence
  Cyclic GFR-binding peptide
ARLSNITIQIMDAANNVV

SEQ ID NO: 10927 - protein, 19 aa, Artificial Sequence
  Cyclic GFR-binding peptide
PTKMSNITMQIMNDKQQII

SEQ ID NO: 10928 - protein, 16 aa, Artificial Sequence
  Cyclic GFR-binding peptide
  MOD_RES (2)..(3): Xaa is C or S
PXXAPTKLSNITVQIM

SEQ ID NO: 10929 - protein, 20 aa, Artificial Sequence
  Cyclic GFR-binding peptide
  MOD_RES (5)..(5): Xaa is C or S
SSVKXQPSRVHHSNITVQIM

SEQ ID NO: 10930 - protein, 20 aa, Artificial Sequence
  Cyclic GFR-binding peptide
VHHSNITVQIMEYVRKKPKL

SEQ ID NO: 10931 - protein, 18 aa, Artificial Sequence
  Cyclic GFR-binding peptide
LSNITVQIMEIVRKKPIF

SEQ ID NO: 10932 - protein, 15 aa, Artificial Sequence
  Cyclic GFR-binding peptide
  MOD_RES (1)..(2): Xaa is C or S
XXAPTKLSNITVQIM

SEQ ID NO: 10933 - protein, 18 aa, Artificial Sequence
  Cyclic GFR-binding peptide
QDLSNITIQIMIGKTPKI

SEQ ID NO: 10934 - protein, 19 aa, Artificial Sequence
  Cyclic GFR-binding peptide
  MOD_RES (5)..(6): Xaa is C or S
VPSTXXAPVKTSNITMQIM

SEQ ID NO: 10935 - protein, 16 aa, Artificial Sequence
  Cyclic GFR-binding peptide
LSNITIQIMVGRTPKV

SEQ ID NO: 10936 - protein, 13 aa, Artificial Sequence
  Cyclic GFR-binding peptide
VPQDLSNITIQIM

SEQ ID NO: 10937 - protein, 18 aa, Artificial Sequence
  Cyclic GFR-binding peptide
  MOD_RES (4)..(5): Xaa is C or S
AAPXXVPQALSNITIQIM

SEQ ID NO: 10938 - protein, 17 aa, Artificial Sequence
  Cyclic GFR-binding peptide
  MOD_RES (3)..(4): Xaa is C or S
ASXXVPARLSNITIQIM

SEQ ID NO: 10939 - protein, 29 aa, Artificial Sequence
  Cyclic GFR-binding peptide
  MOD_RES (5)..(5): Xaa is C or S
RNVQXRPTQVQLSNITVQIMEIVRKKPIF

SEQ ID NO: 10940 - protein, 13 aa, Artificial Sequence
  Cyclic GFR-binding peptide
VSQDLSNITIQIM

SEQ ID NO: 10941 - protein, 18 aa, Artificial Sequence
  Cyclic GFR-binding peptide
  MOD_RES (4)..(5): Xaa is C or S
PSTXXAPVKTSNITMQIM

SEQ ID NO: 10942 - protein, 17 aa, Artificial Sequence
  Cyclic GFR-binding peptide
RLSNITIQIMDAANNVV

SEQ ID NO: 10943 - protein, 15 aa, Artificial Sequence
  Cyclic GFR-binding peptide
SNITVQIMDDSSNVI

SEQ ID NO: 10944 - protein, 18 aa, Artificial Sequence
  Cyclic GFR-binding peptide
  MOD_RES (3)..(3): Xaa is C or S
VKXQPSRVHHSNITVQIM

SEQ ID NO: 10945 - protein, 14 aa, Artificial Sequence
  Cyclic GFR-binding peptide
PTQVQLSNITVQIM

SEQ ID NO: 10946 - protein, 17 aa, Artificial Sequence
  Cyclic GFR-binding peptide
  MOD_RES (3)..(4): Xaa is C or S
APXXVPQALSNITIQIM

SEQ ID NO: 10947 - protein, 17 aa, Artificial Sequence
  Cyclic GFR-binding peptide
  MOD_RES (3)..(4): Xaa is C or S
SPXXVSQDLSNITIQIM

SEQ ID NO: 10948 - protein, 17 aa, Artificial Sequence
  Cyclic GFR-binding peptide
  MOD_RES (3)..(4): Xaa is C or S
STXXAPVKTSNITMQIM

SEQ ID NO: 10949 - protein, 20 aa, Artificial Sequence
  Cyclic GFR-binding peptide
  MOD_RES (6)..(7): Xaa is C or S
RVPSTXXAPVKTSNITMQIM

SEQ ID NO: 10950 - protein, 17 aa, Artificial Sequence
  Cyclic GFR-binding peptide
KMSNITMQIMNDKQQII

SEQ ID NO: 10951 - protein, 19 aa, Artificial Sequence
  Cyclic GFR-binding peptide
PARLSNITIQIMDAANNVV

SEQ ID NO: 10952 - protein, 18 aa, Artificial Sequence
  Cyclic GFR-binding peptide
  MOD_RES (4)..(5): Xaa is C or S
ASPXXVSQDLSNITIQIM

SEQ ID NO: 10953 - protein, 15 aa, Artificial Sequence
  Cyclic GFR-binding peptide
  MOD_RES (1)..(2): Xaa is C or S
XXVPQALSNITIQIM

SEQ ID NO: 10954 - protein, 19 aa, Artificial Sequence
  Cyclic GFR-binding peptide
PTRLSNITIQIMDSANNVV

SEQ ID NO: 10955 - protein, 27 aa, Artificial Sequence
  Cyclic GFR-binding peptide
  MOD_RES (6)..(7): Xaa is C or S
GSAGPXXTPTKMSNITMQIMNDKQQII

SEQ ID NO: 10956 - protein, 20 aa, Artificial Sequence
  Cyclic GFR-binding peptide
  MOD_RES (6)..(7): Xaa is C or S
GSAGPXXTPTKMSNITMQIM

SEQ ID NO: 10957 - protein, 14 aa, Artificial Sequence
  Cyclic GFR-binding peptide
  MOD_RES (1)..(1): Xaa is C or S
XVPTRLSNITIQIM

SEQ ID NO: 10958 - protein, 18 aa, Artificial Sequence
  Cyclic GFR-binding peptide
  MOD_RES (4)..(5): Xaa is C or S
PKPXXAPTKLSNITVQIM

SEQ ID NO: 10959 - protein, 18 aa, Artificial Sequence
  Cyclic GFR-binding peptide
  MOD_RES (4)..(5): Xaa is C or S
ASPXXVPQDLSNITIQIM

SEQ ID NO: 10960 - protein, 14 aa, Artificial Sequence
  Cyclic GFR-binding peptide
  MOD_RES (1)..(1): Xaa is C or S
XVSQDLSNITIQIM

SEQ ID NO: 10961 - protein, 19 aa, Artificial Sequence
  Cyclic GFR-binding peptide
  MOD_RES (5)..(6): Xaa is C or S
APASXXVPARLSNITIQIM

SEQ ID NO: 10962 - protein, 16 aa, Artificial Sequence
  Cyclic GFR-binding peptide
LSNITVQIMDDSSNVI

SEQ ID NO: 10963 - protein, 27 aa, Artificial Sequence
  Cyclic GFR-binding peptide
  MOD_RES (6)..(7): Xaa is C or S
ASAAPXXVPQALSNITIQIMVGRKPKV

SEQ ID NO: 10964 - protein, 17 aa, Artificial Sequence
  Cyclic GFR-binding peptide
  MOD_RES (2)..(2): Xaa is C or S
QXRPTQVQLSNITVQIM

SEQ ID NO: 10965 - protein, 13 aa, Artificial Sequence
  Cyclic GFR-binding peptide
VPARLSNITIQIM

SEQ ID NO: 10966 - protein, 20 aa, Artificial Sequence
  Cyclic GFR-binding peptide
VQLSNITVQIMEIVRKKPIF

SEQ ID NO: 10967 - protein, 20 aa, Artificial Sequence
  Cyclic GFR-binding peptide
  MOD_RES (6)..(7): Xaa is C or S
HVPKPXXAPTKLSNITVQIM

SEQ ID NO: 10968 - protein, 17 aa, Artificial Sequence
  Cyclic GFR-binding peptide
  MOD_RES (3)..(4): Xaa is C or S
PTXXVPTRLSNITIQIM

SEQ ID NO: 10969 - protein, 27 aa, Artificial Sequence
  Cyclic GFR-binding peptide
  MOD_RES (6)..(7): Xaa is C or S
ASASPXXVSQDLSNITIQIMIGKTPKI

SEQ ID NO: 10970 - protein, 20 aa, Artificial Sequence
  Cyclic GFR-binding peptide
  MOD_RES (6)..(7): Xaa is C or S
ASASPXXVPQDLSNITIQIM

SEQ ID NO: 10971 - protein, 19 aa, Artificial Sequence
  Cyclic GFR-binding peptide
  MOD_RES (5)..(6): Xaa is C or S
VPKPXXAPTKLSNITVQIM

SEQ ID NO: 10972 - protein, 18 aa, Artificial Sequence
  Cyclic GFR-binding peptide
TKMSNITMQIMNDKQQII

SEQ ID NO: 10973 - protein, 19 aa, Artificial Sequence
  Cyclic GFR-binding peptide
  MOD_RES (5)..(6): Xaa is C or S
SAAPXXVPQALSNITIQIM

SEQ ID NO: 10974 - protein, 18 aa, Artificial Sequence
  Cyclic GFR-binding peptide
QDLSNITIQIMVGRTPKV

SEQ ID NO: 10975 - protein, 17 aa, Artificial Sequence
  Cyclic GFR-binding peptide
  MOD_RES (3)..(4): Xaa is C or S
KPXXAPTKLSNITVQIM

SEQ ID NO: 10976 - protein, 16 aa, Artificial Sequence
  Cyclic GFR-binding peptide
  MOD_RES (2)..(3): Xaa is C or S
PXXVPQALSNITIQIM

SEQ ID NO: 10977 - protein, 16 aa, Artificial Sequence
  Cyclic GFR-binding peptide
TSNITMQIMDNGRVLL

SEQ ID NO: 10978 - protein, 20 aa, Artificial Sequence
  Cyclic GFR-binding peptide
  MOD_RES (6)..(7): Xaa is C or S
STPPTXXVPTRLSNITIQIM

SEQ ID NO: 10979 - protein, 27 aa, Artificial Sequence
  Cyclic GFR-binding peptide
  MOD_RES (6)..(7): Xaa is C or S
STPPTXXVPTRLSNITIQIMDSANNVV

SEQ ID NO: 10980 - protein, 19 aa, Artificial Sequence
  Cyclic GFR-binding peptide
PTKLSNITVQIMDDSSNVI

SEQ ID NO: 10981 - protein, 15 aa, Artificial Sequence
  Cyclic GFR-binding peptide
SNITIQIMIGKTPKI

SEQ ID NO: 10982 - protein, 14 aa, Artificial Sequence
  Cyclic GFR-binding peptide
  MOD_RES (1)..(1): Xaa is C or S
XVPARLSNITIQIM

SEQ ID NO: 10983 - protein, 16 aa, Artificial Sequence
  Cyclic GFR-binding peptide
  MOD_RES (2)..(3): Xaa is C or S
PXXVPQDLSNITIQIM

SEQ ID NO: 10984 - protein, 14 aa, Artificial Sequence
  Cyclic GFR-binding peptide
  MOD_RES (1)..(1): Xaa is C or S
XAPTKLSNITVQIM

SEQ ID NO: 10985 - protein, 15 aa, Artificial Sequence
  Cyclic GFR-binding peptide
SNITMQIMNDKQQII

SEQ ID NO: 10986 - protein, 20 aa, Artificial Sequence
  Cyclic GFR-binding peptide
  MOD_RES (6)..(7): Xaa is C or S
ASASPXXVSQDLSNITIQIM

SEQ ID NO: 10987 - protein, 19 aa, Artificial Sequence
  Cyclic GFR-binding peptide
  MOD_RES (4)..(4): Xaa is C or S
SVKXQPSRVHHSNITVQIM

SEQ ID NO: 10988 - protein, 18 aa, Artificial Sequence
  Cyclic GFR-binding peptide
  MOD_RES (4)..(5): Xaa is C or S
PASXXVPARLSNITIQIM

SEQ ID NO: 10989 - protein, 19 aa, Artificial Sequence
  Cyclic GFR-binding peptide
  MOD_RES (5)..(6): Xaa is C or S
SAGPXXTPTKMSNITMQIM

SEQ ID NO: 10990 - protein, 17 aa, Artificial Sequence
  Cyclic GFR-binding peptide
DLSNITIQIMVGRTPKV

SEQ ID NO: 10991 - protein, 19 aa, Artificial Sequence
  Cyclic GFR-binding peptide
  MOD_RES (4)..(4): Xaa is C or S
NVQXRPTQVQLSNITVQIM

SEQ ID NO: 10992 - protein, 15 aa, Artificial Sequence
  Cyclic GFR-binding peptide
  MOD_RES (1)..(2): Xaa is C or S
XXVSQDLSNITIQIM

SEQ ID NO: 10993 - protein, 15 aa, Artificial Sequence
  Cyclic GFR-binding peptide
SNITIQIMVGRTPKV

SEQ ID NO: 10994 - protein, 16 aa, Artificial Sequence
  Cyclic GFR-binding peptide
  MOD_RES (1)..(1): Xaa is C or S
XQPSRVHHSNITVQIM

SEQ ID NO: 10995 - protein, 29 aa, Artificial Sequence
  Cyclic GFR-binding peptide
  MOD_RES (5)..(5): Xaa is C or S
SSVKXQPSRVHHSNITVQIMEYVRKKPKL

SEQ ID NO: 10996 - protein, 16 aa, Artificial Sequence
  Cyclic GFR-binding peptide
LSNITIQIMDAANNVV

SEQ ID NO: 10997 - protein, 19 aa, Artificial Sequence
  Cyclic GFR-binding peptide
PVKTSNITMQIMDNGRVLL

SEQ ID NO: 10998 - protein, 17 aa, Artificial Sequence
  Cyclic GFR-binding peptide
  MOD_RES (3)..(4): Xaa is C or S
SPXXVPQDLSNITIQIM

SEQ ID NO: 10999 - protein, 20 aa, Artificial Sequence
  Cyclic GFR-binding peptide
  MOD_RES (6)..(7): Xaa is C or S
AAPASXXVPARLSNITIQIM

SEQ ID NO: 11000 - protein, 14 aa, Artificial Sequence
  Cyclic GFR-binding peptide
  MOD_RES (1)..(1): Xaa is C or S
XAPVKTSNITMQIM

SEQ ID NO: 11001 - protein, 21 aa, Artificial Sequence
  Cyclic GFR-binding peptide
QVQLSNITVQIMEIVRKKPIF

SEQ ID NO: 11002 - protein, 17 aa, Artificial Sequence
  Cyclic GFR-binding peptide
DLSNITIQIMIGKTPKI

SEQ ID NO: 11003 - protein, 18 aa, Artificial Sequence
  Cyclic GFR-binding peptide
HSNITVQIMEYVRKKPKL

SEQ ID NO: 11004 - protein, 17 aa, Artificial Sequence
  Cyclic GFR-binding peptide
SNITVQIMEIVRKKPIF

SEQ ID NO: 11005 - protein, 17 aa, Artificial Sequence
  Cyclic GFR-binding peptide
KTSNITMQIMDNGRVLL

SEQ ID NO: 11006 - protein, 15 aa, Artificial Sequence
  Cyclic GFR-binding peptide
IKPTKGIFYLISIAN

SEQ ID NO: 11007 - protein, 13 aa, Artificial Sequence
  Cyclic GFR-binding peptide
LYLVSIASLQTPA

SEQ ID NO: 11008 - protein, 16 aa, Artificial Sequence
  Cyclic GFR-binding peptide
IIQQKDNLYLMSIASM

SEQ ID NO: 11009 - protein, 27 aa, Artificial Sequence
  Cyclic GFR-binding peptide
  MOD_RES (21)..(22): Xaa is C or S
TPVGMDDFYLVSIANLKTPVXXAKGVK

SEQ ID NO: 11010 - protein, 14 aa, Artificial Sequence
  Cyclic GFR-binding peptide
  MOD_RES (14)..(14): Xaa is C or S
FYLISIANLKTPVX

SEQ ID NO: 11011 - protein, 27 aa, Artificial Sequence
  Cyclic GFR-binding peptide
  MOD_RES (21)..(22): Xaa is C or S
TPVGMDDLYLVSIASLKTPVXXAKGVK

SEQ ID NO: 11012 - protein, 17 aa, Artificial Sequence
  Cyclic GFR-binding peptide
IVNSSDDLYLVSIASLK

SEQ ID NO: 11013 - protein, 16 aa, Artificial Sequence
  Cyclic GFR-binding peptide
IIQQKDNFYLMSIANM

SEQ ID NO: 11014 - protein, 19 aa, Artificial Sequence
  Cyclic GFR-binding peptide
  MOD_RES (14)..(15): Xaa is C or S
LYLISIASLDQSVXXPSAS

SEQ ID NO: 11015 - protein, 16 aa, Artificial Sequence
  Cyclic GFR-binding peptide
VVKENEDLYLMSIASL

SEQ ID NO: 11016 - protein, 15 aa, Artificial Sequence
  Cyclic GFR-binding peptide
  MOD_RES (14)..(15): Xaa is C or S
FYLMSIANTKVPAXX

SEQ ID NO: 11017 - protein, 15 aa, Artificial Sequence
  Cyclic GFR-binding peptide
  MOD_RES (14)..(15): Xaa is C or S
LYLISIASLRAPVXX

SEQ ID NO: 11018 - protein, 13 aa, Artificial Sequence
  Cyclic GFR-binding peptide
LYLISIASLRTPV

SEQ ID NO: 11019 - protein, 13 aa, Artificial Sequence
  Cyclic GFR-binding peptide
LYLISIASLAQPV

SEQ ID NO: 11020 - protein, 16 aa, Artificial Sequence
  Cyclic GFR-binding peptide
TPVGMDDFYLVSIANL

SEQ ID NO: 11021 - protein, 15 aa, Artificial Sequence
  Cyclic GFR-binding peptide
IKPTKGILYLISIAS

SEQ ID NO: 11022 - protein, 19 aa, Artificial Sequence
  Cyclic GFR-binding peptide
  MOD_RES (14)..(15): Xaa is C or S
LYLISIASMKEPVXXPEPI

SEQ ID NO: 11023 - protein, 14 aa, Artificial Sequence
  Cyclic GFR-binding peptide
  MOD_RES (14)..(14): Xaa is C or S
LYLISIASMKEPVX

SEQ ID NO: 11024 - protein, 18 aa, Artificial Sequence
  Cyclic GFR-binding peptide
YTVVGKDFYLISIANLKT

SEQ ID NO: 11025 - protein, 20 aa, Artificial Sequence
  Cyclic GFR-binding peptide
  MOD_RES (14)..(15): Xaa is C or S
LYLISIASLRTPVXXTPPTS

SEQ ID NO: 11026 - protein, 14 aa, Artificial Sequence
  Cyclic GFR-binding peptide
  MOD_RES (14)..(14): Xaa is C or S
LYLMSIASTKVPAX

SEQ ID NO: 11027 - protein, 18 aa, Artificial Sequence
  Cyclic GFR-binding peptide
  MOD_RES (14)..(15): Xaa is C or S
FYLVSIANLKTPAXXAKP

SEQ ID NO: 11028 - protein, 17 aa, Artificial Sequence
  Cyclic GFR-binding peptide
IVNSSDDFYLVSIANLQ

SEQ ID NO: 11029 - protein, 18 aa, Artificial Sequence
  Cyclic GFR-binding peptide
YTVVGKDLYLISIASLKT

SEQ ID NO: 11030 - protein, 17 aa, Artificial Sequence
  Cyclic GFR-binding peptide
IVNSSDDFYLVSIANLK

SEQ ID NO: 11031 - protein, 27 aa, Artificial Sequence
  Cyclic GFR-binding peptide
  MOD_RES (21)..(22): Xaa is C or S
IVNSSDDLYLVSIASLKTPAXXPKPVH

SEQ ID NO: 11032 - protein, 17 aa, Artificial Sequence
  Cyclic GFR-binding peptide
IVNSSDDLYLVSIASLQ

SEQ ID NO: 11033 - protein, 15 aa, Artificial Sequence
  Cyclic GFR-binding peptide
VVNNASDFYLISIAN

SEQ ID NO: 11034 - protein, 19 aa, Artificial Sequence
  Cyclic GFR-binding peptide
  MOD_RES (14)..(15): Xaa is C or S
LYLISIASLRTPVXXTPPT

SEQ ID NO: 11035 - protein, 16 aa, Artificial Sequence
  Cyclic GFR-binding peptide
  MOD_RES (14)..(15): Xaa is C or S
FYLISIANLRAPVXXS

SEQ ID NO: 11036 - protein, 15 aa, Artificial Sequence
  Cyclic GFR-binding peptide
VVNNAADLYLISIAS

SEQ ID NO: 11037 - protein, 27 aa, Artificial Sequence
  Cyclic GFR-binding peptide
  MOD_RES (21)..(22): Xaa is C or S
IVNSSDDFYLVSIANLKTPAXXPKPVH

SEQ ID NO: 11038 - protein, 18 aa, Artificial Sequence
  Cyclic GFR-binding peptide
IVNNSSDFYLVSIANLKT

SEQ ID NO: 11039 - protein, 16 aa, Artificial Sequence
  Cyclic GFR-binding peptide
VVKENEDFYLMSIANL

SEQ ID NO: 11040 - protein, 15 aa, Artificial Sequence
  Cyclic GFR-binding peptide
VVNNASDLYLISIAS

SEQ ID NO: 11041 - protein, 20 aa, Artificial Sequence
  Cyclic GFR-binding peptide
  MOD_RES (14)..(15): Xaa is C or S
LYLMSIASTKVPAXXTSPVR

SEQ ID NO: 11042 - protein, 16 aa, Artificial Sequence
  Cyclic GFR-binding peptide
  MOD_RES (14)..(15): Xaa is C or S
LYLISIASLAQPVXXP

SEQ ID NO: 11043 - protein, 19 aa, Artificial Sequence
  Cyclic GFR-binding peptide
  MOD_RES (14)..(15): Xaa is C or S
FYLISIANLRAPVXXSAPA

SEQ ID NO: 11044 - protein, 16 aa, Artificial Sequence
  Cyclic GFR-binding peptide
  MOD_RES (14)..(15): Xaa is C or S
LYLVSIASLQTPAXXP

SEQ ID NO: 11045 - protein, 15 aa, Artificial Sequence
  Cyclic GFR-binding peptide
VVNNAADFYLISIAN

SEQ ID NO: 11046 - protein, 18 aa, Artificial Sequence
  Cyclic GFR-binding peptide
VVKDYEDLYLMSIASLET

SEQ ID NO: 11047 - protein, 18 aa, Artificial Sequence
  Cyclic GFR-binding peptide
IVNNSSDLYLVSIASLKT

SEQ ID NO: 11048 - protein, 13 aa, Artificial Sequence
  Cyclic GFR-binding peptide
LYLISIASLRAPV

SEQ ID NO: 11049 - protein, 15 aa, Artificial Sequence
  Cyclic GFR-binding peptide
  MOD_RES (14)..(15): Xaa is C or S
FYLISIANMKEPVXX

SEQ ID NO: 11050 - protein, 20 aa, Artificial Sequence
  Cyclic GFR-binding peptide
  MOD_RES (14)..(15): Xaa is C or S
LYLMSIASMKTPTXXPGASG

SEQ ID NO: 11051 - protein, 13 aa, Artificial Sequence
  Cyclic GFR-binding peptide
FYLISIANLRAPV

SEQ ID NO: 11052 - protein, 20 aa, Artificial Sequence
  Cyclic GFR-binding peptide
  MOD_RES (14)..(15): Xaa is C or S
FYLVSIANLKTPAXXPKPVH

SEQ ID NO: 11053 - protein, 15 aa, Artificial Sequence
  Cyclic GFR-binding peptide
VKPKRGVFYLISIAN

SEQ ID NO: 11054 - protein, 19 aa, Artificial Sequence
  Cyclic GFR-binding peptide
VVKDYEDLYLMSIASLETP

SEQ ID NO: 11055 - protein, 18 aa, Artificial Sequence
  Cyclic GFR-binding peptide
VVNNASDFYLISIANLRT

SEQ ID NO: 11056 - protein, 16 aa, Artificial Sequence
  Cyclic GFR-binding peptide
IVNSSDDLYLVSIASL

SEQ ID NO: 11057 - protein, 20 aa, Artificial Sequence
  Cyclic GFR-binding peptide
  MOD_RES (14)..(15): Xaa is C or S
FYLMSIANMKTPTXXPGASG

SEQ ID NO: 11058 - protein, 15 aa, Artificial Sequence
  Cyclic GFR-binding peptide
  MOD_RES (14)..(15): Xaa is C or S
LYLISIASMKEPVXX

SEQ ID NO: 11059 - protein, 19 aa, Artificial Sequence
  Cyclic GFR-binding peptide
VVNNAADFYLISIANLRAP

SEQ ID NO: 11060 - protein, 13 aa, Artificial Sequence
  Cyclic GFR-binding peptide
LYLISIASLDQSV

SEQ ID NO: 11061 - protein, 19 aa, Artificial Sequence
  Cyclic GFR-binding peptide
  MOD_RES (14)..(15): Xaa is C or S
LYLISIASLRAPVXXSAPA

SEQ ID NO: 11062 - protein, 17 aa, Artificial Sequence
  Cyclic GFR-binding peptide
VVKENEDLYLMSIASLE

SEQ ID NO: 11063 - protein, 17 aa, Artificial Sequence
  Cyclic GFR-binding peptide
  MOD_RES (14)..(15): Xaa is C or S
FYLISIANLDQPVXXPS

SEQ ID NO: 11064 - protein, 20 aa, Artificial Sequence
  Cyclic GFR-binding peptide
  MOD_RES (14)..(15): Xaa is C or S
FYLVSIANLKTPAXXAKPVA

SEQ ID NO: 11065 - protein, 16 aa, Artificial Sequence
  Cyclic GFR-binding peptide
  MOD_RES (14)..(15): Xaa is C or S
LYLVSIASLKTPAXXA

SEQ ID NO: 11066 - protein, 18 aa, Artificial Sequence
  Cyclic GFR-binding peptide
  MOD_RES (14)..(15): Xaa is C or S
LYLISIASLDQPVXXPSA

SEQ ID NO: 11067 - protein, 19 aa, Artificial Sequence
  Cyclic GFR-binding peptide
  MOD_RES (14)..(15): Xaa is C or S
LYLMSIASTKVPAXXTSPV

SEQ ID NO: 11068 - protein, 15 aa, Artificial Sequence
  Cyclic GFR-binding peptide
  MOD_RES (14)..(15): Xaa is C or S
LYLISIASLAQPVXX

SEQ ID NO: 11069 - protein, 18 aa, Artificial Sequence
  Cyclic GFR-binding peptide
  MOD_RES (14)..(15): Xaa is C or S
LYLVSIASLKTPVXXAKG

SEQ ID NO: 11070 - protein, 17 aa, Artificial Sequence
  Cyclic GFR-binding peptide
VVNNAADFYLISIANLR

SEQ ID NO: 11071 - protein, 18 aa, Artificial Sequence
  Cyclic GFR-binding peptide
  MOD_RES (14)..(15): Xaa is C or S
FYLISIANLRAPVXXSAP

SEQ ID NO: 11072 - protein, 17 aa, Artificial Sequence
  Cyclic GFR-binding peptide
  MOD_RES (14)..(15): Xaa is C or S
LYLMSIASMKTPTXXPG

SEQ ID NO: 11073 - protein, 15 aa, Artificial Sequence
  Cyclic GFR-binding peptide
IVNSSDDFYLVSIAN

SEQ ID NO: 11074 - protein, 27 aa, Artificial Sequence
  Cyclic GFR-binding peptide
  MOD_RES (21)..(22): Xaa is C or S
VKPKRGVLYLISIASLAQPVXXPAASA

SEQ ID NO: 11075 - protein, 14 aa, Artificial Sequence
  Cyclic GFR-binding peptide
  MOD_RES (14)..(14): Xaa is C or S
FYLMSIANTKVPAX

SEQ ID NO: 11076 - protein, 18 aa, Artificial Sequence
  Cyclic GFR-binding peptide
  MOD_RES (14)..(15): Xaa is C or S
FYLMSIANLETPVXXAKP

SEQ ID NO: 11077 - protein, 17 aa, Artificial Sequence
  Cyclic GFR-binding peptide
TPVGMDDLYLVSIASLK

SEQ ID NO: 11078 - protein, 19 aa, Artificial Sequence
  Cyclic GFR-binding peptide
YTVVGKDFYLISIANLKTP

SEQ ID NO: 11079 - protein, 13 aa, Artificial Sequence
  Cyclic GFR-binding peptide
LYLISIASMKEPV

SEQ ID NO: 11080 - protein, 18 aa, Artificial Sequence
  Cyclic GFR-binding peptide
IKPTKGILYLISIASLDQ

SEQ ID NO: 11081 - protein, 16 aa, Artificial Sequence
  Cyclic GFR-binding peptide
TPVGMDDLYLVSIASL

SEQ ID NO: 11082 - protein, 27 aa, Artificial Sequence
  Cyclic GFR-binding peptide
  MOD_RES (21)..(22): Xaa is C or S
VVNKNEDLYLISIASMKEPVXXPEPIG

SEQ ID NO: 11083 - protein, 17 aa, Artificial Sequence
  Cyclic GFR-binding peptide
IIQQKDNFYLMSIANMK

SEQ ID NO: 11084 - protein, 27 aa, Artificial Sequence
  Cyclic GFR-binding peptide
  MOD_RES (21)..(22): Xaa is C or S
IVNNSSDFYLVSIANLKTPAXXAKPVA

SEQ ID NO: 11085 - protein, 13 aa, Artificial Sequence
  Cyclic GFR-binding peptide
FYLISIANMKEPV

SEQ ID NO: 11086 - protein, 18 aa, Artificial Sequence
  Cyclic GFR-binding peptide
  MOD_RES (14)..(15): Xaa is C or S
FYLVSIANLKTPVXXAKG

SEQ ID NO: 11087 - protein, 27 aa, Artificial Sequence
  Cyclic GFR-binding peptide
  MOD_RES (21)..(22): Xaa is C or S
IKPTKGILYLISIASLDQSVXXPSASA

SEQ ID NO: 11088 - protein, 15 aa, Artificial Sequence
  Cyclic GFR-binding peptide
  MOD_RES (14)..(15): Xaa is C or S
FYLISIANLRAPVXX

SEQ ID NO: 11089 - protein, 17 aa, Artificial Sequence
  Cyclic GFR-binding peptide
VKPTRGVFYLISIANLD

SEQ ID NO: 11090 - protein, 17 aa, Artificial Sequence
  Cyclic GFR-binding peptide
  MOD_RES (14)..(15): Xaa is C or S
FYLMSIANLETPVXXAK

SEQ ID NO: 11091 - protein, 15 aa, Artificial Sequence
  Cyclic GFR-binding peptide
IIQQKDNLYLMSIAS

SEQ ID NO: 11092 - protein, 14 aa, Artificial Sequence
  Cyclic GFR-binding peptide
  MOD_RES (14)..(14): Xaa is C or S
LYLISIASLKTPVX

SEQ ID NO: 11093 - protein, 17 aa, Artificial Sequence
  Cyclic GFR-binding peptide
  MOD_RES (14)..(15): Xaa is C or S
FYLISIANLAQPVXXPA

SEQ ID NO: 11094 - protein, 15 aa, Artificial Sequence
  Cyclic GFR-binding peptide
VVNKNEDFYLISIAN

SEQ ID NO: 11095 - protein, 20 aa, Artificial Sequence
  Cyclic GFR-binding peptide
  MOD_RES (14)..(15): Xaa is C or S
LYLVSIASLQTPAXXPKPVT

SEQ ID NO: 11096 - protein, 18 aa, Artificial Sequence
  Cyclic GFR-binding peptide
  MOD_RES (14)..(15): Xaa is C or S
LYLMSIASLETPVXXAKP

SEQ ID NO: 11097 - protein, 18 aa, Artificial Sequence
  Cyclic GFR-binding peptide
  MOD_RES (14)..(15): Xaa is C or S
LYLISIASLAQPVXXPAA

SEQ ID NO: 11098 - protein, 19 aa, Artificial Sequence
  Cyclic GFR-binding peptide
  MOD_RES (14)..(15): Xaa is C or S
LYLVSIASLQTPAXXPKPV

SEQ ID NO: 11099 - protein, 16 aa, Artificial Sequence
  Cyclic GFR-binding peptide
VVNNASDLYLISIASL

SEQ ID NO: 11100 - protein, 27 aa, Artificial Sequence
  Cyclic GFR-binding peptide
  MOD_RES (21)..(22): Xaa is C or S
IIQQKDNLYLMSIASMKTPTXXPGASG

SEQ ID NO: 11101 - protein, 15 aa, Artificial Sequence
  Cyclic GFR-binding peptide
LLVRGNDFYLMSIAN

SEQ ID NO: 11102 - protein, 19 aa, Artificial Sequence
  Cyclic GFR-binding peptide
IVNNSSDFYLVSIANLKTP

SEQ ID NO: 11103 - protein, 14 aa, Artificial Sequence
  Cyclic GFR-binding peptide
  MOD_RES (14)..(14): Xaa is C or S
LYLISIASLAQPVX

SEQ ID NO: 11104 - protein, 20 aa, Artificial Sequence
  Cyclic GFR-binding peptide
  MOD_RES (14)..(14): Xaa is C or S
LYLVSIASLKTPAXTPKTVH

SEQ ID NO: 11105 - protein, 17 aa, Artificial Sequence
  Cyclic GFR-binding peptide
VVNKNEDLYLISIASMK

SEQ ID NO: 11106 - protein, 13 aa, Artificial Sequence
  Cyclic GFR-binding peptide
LYLVSIASLKTPA

SEQ ID NO: 11107 - protein, 27 aa, Artificial Sequence
  Cyclic GFR-binding peptide
  MOD_RES (21)..(22): Xaa is C or S
IVNNSSDLYLVSIASLKTPAXXAKPVA

SEQ ID NO: 11108 - protein, 17 aa, Artificial Sequence
  Cyclic GFR-binding peptide
  MOD_RES (14)..(15): Xaa is C or S
FYLVSIANLKTPAXXAK

SEQ ID NO: 11109 - protein, 19 aa, Artificial Sequence
  Cyclic GFR-binding peptide
  MOD_RES (14)..(15): Xaa is C or S
LYLVSIASLKTPAXXAKPV

SEQ ID NO: 11110 - protein, 15 aa, Artificial Sequence
  Cyclic GFR-binding peptide
TPVGMDDLYLVSIAS

SEQ ID NO: 11111 - protein, 16 aa, Artificial Sequence
  Cyclic GFR-binding peptide
  MOD_RES (14)..(15): Xaa is C or S
LYLISIASLRAPVXXS

SEQ ID NO: 11112 - protein, 14 aa, Artificial Sequence
  Cyclic GFR-binding peptide
  MOD_RES (14)..(14): Xaa is C or S
FYLVSIANLKTPAX

SEQ ID NO: 11113 - protein, 17 aa, Artificial Sequence
  Cyclic GFR-binding peptide
  MOD_RES (14)..(15): Xaa is C or S
LYLISIASLKTPVXXAK

SEQ ID NO: 11114 - protein, 27 aa, Artificial Sequence
  Cyclic GFR-binding peptide
  MOD_RES (21)..(22): Xaa is C or S
VVKDYEDFYLMSIANLETPVXXAKPIS

SEQ ID NO: 11115 - protein, 14 aa, Artificial Sequence
  Cyclic GFR-binding peptide
  MOD_RES (14)..(14): Xaa is C or S
LYLMSIASMKTPTX

SEQ ID NO: 11116 - protein, 19 aa, Artificial Sequence
  Cyclic GFR-binding peptide
  MOD_RES (14)..(15): Xaa is C or S
LYLISIASLDQPVXXPSAS

SEQ ID NO: 11117 - protein, 17 aa, Artificial Sequence
  Cyclic GFR-binding peptide
  MOD_RES (14)..(15): Xaa is C or S
FYLVSIANLKTPVXXAK

SEQ ID NO: 11118 - protein, 16 aa, Artificial Sequence
  Cyclic GFR-binding peptide
IKPTKGILYLISIASL

SEQ ID NO: 11119 - protein, 16 aa, Artificial Sequence
  Cyclic GFR-binding peptide
  MOD_RES (14)..(15): Xaa is C or S
LYLMSIASLETPVXXA

SEQ ID NO: 11120 - protein, 15 aa, Artificial Sequence
  Cyclic GFR-binding peptide
  MOD_RES (14)..(15): Xaa is C or S
FYLMSIANMKTPTXX

SEQ ID NO: 11121 - protein, 20 aa, Artificial Sequence
  Cyclic GFR-binding peptide
  MOD_RES (14)..(15): Xaa is C or S
LYLISIASLKTPVXXAKSAK

SEQ ID NO: 11122 - protein, 19 aa, Artificial Sequence
  Cyclic GFR-binding peptide
  MOD_RES (14)..(14): Xaa is C or S
FYLVSIANLKTPAXTPKTV

SEQ ID NO: 11123 - protein, 17 aa, Artificial Sequence
  Cyclic GFR-binding peptide
  MOD_RES (14)..(14): Xaa is C or S
LYLVSIASLKTPAXTPK

SEQ ID NO: 11124 - protein, 15 aa, Artificial Sequence
  Cyclic GFR-binding peptide
  MOD_RES (14)..(15): Xaa is C or S
FYLISIANLDQPVXX

SEQ ID NO: 11125 - protein, 18 aa, Artificial Sequence
  Cyclic GFR-binding peptide
  MOD_RES (14)..(15): Xaa is C or S
FYLISIANMKEPVXXPEP

SEQ ID NO: 11126 - protein, 17 aa, Artificial Sequence
  Cyclic GFR-binding peptide
VVNNASDFYLISIANLR

SEQ ID NO: 11127 - protein, 16 aa, Artificial Sequence
  Cyclic GFR-binding peptide
  MOD_RES (14)..(15): Xaa is C or S
FYLISIANLRTPVXXT

SEQ ID NO: 11128 - protein, 20 aa, Artificial Sequence
  Cyclic GFR-binding peptide
  MOD_RES (14)..(15): Xaa is C or S
FYLMSIANLETPVXXAKPIK

SEQ ID NO: 11129 - protein, 17 aa, Artificial Sequence
  Cyclic GFR-binding peptide
VVKENEDFYLMSIANLE

SEQ ID NO: 11130 - protein, 18 aa, Artificial Sequence
  Cyclic GFR-binding peptide
LLVRGNDLYLMSIASTKV

SEQ ID NO: 11131 - protein, 17 aa, Artificial Sequence
  Cyclic GFR-binding peptide
  MOD_RES (14)..(15): Xaa is C or S
LYLVSIASLKTPAXXPK

SEQ ID NO: 11132 - protein, 18 aa, Artificial Sequence
  Cyclic GFR-binding peptide
  MOD_RES (14)..(15): Xaa is C or S
LYLVSIASLKTPAXXAKP

SEQ ID NO: 11133 - protein, 13 aa, Artificial Sequence
  Cyclic GFR-binding peptide
FYLISIANLKTPV

SEQ ID NO: 11134 - protein, 18 aa, Artificial Sequence
  Cyclic GFR-binding peptide
  MOD_RES (14)..(15): Xaa is C or S
FYLMSIANMKTPTXXPGA

SEQ ID NO: 11135 - protein, 15 aa, Artificial Sequence
  Cyclic GFR-binding peptide
  MOD_RES (14)..(15): Xaa is C or S
FYLISIANLKTPVXX

SEQ ID NO: 11136 - protein, 15 aa, Artificial Sequence
  Cyclic GFR-binding peptide
  MOD_RES (14)..(15): Xaa is C or S
FYLISIANLAQPVXX

SEQ ID NO: 11137 - protein, 13 aa, Artificial Sequence
  Cyclic GFR-binding peptide
LYLISIASLDQPV

SEQ ID NO: 11138 - protein, 13 aa, Artificial Sequence
  Cyclic GFR-binding peptide
FYLISIANLAQPV

SEQ ID NO: 11139 - protein, 18 aa, Artificial Sequence
  Cyclic GFR-binding peptide
LLVRGNDFYLMSIANTKV

SEQ ID NO: 11140 - protein, 19 aa, Artificial Sequence
  Cyclic GFR-binding peptide
VKPTRGVLYLISIASLDQP

SEQ ID NO: 11141 - protein, 16 aa, Artificial Sequence
  Cyclic GFR-binding peptide
LLVRGNDFYLMSIANT

SEQ ID NO: 11142 - protein, 14 aa, Artificial Sequence
  Cyclic GFR-binding peptide
  MOD_RES (14)..(14): Xaa is C or S
LYLISIASLDQPVX

SEQ ID NO: 11143 - protein, 19 aa, Artificial Sequence
  Cyclic GFR-binding peptide
IVNSSDDFYLVSIANLKTP

SEQ ID NO: 11144 - protein, 15 aa, Artificial Sequence
  Cyclic GFR-binding peptide
YTVVGKDFYLISIAN

SEQ ID NO: 11145 - protein, 18 aa, Artificial Sequence
  Cyclic GFR-binding peptide
  MOD_RES (14)..(15): Xaa is C or S
LYLVSIASLKTPAXXPKP

SEQ ID NO: 11146 - protein, 18 aa, Artificial Sequence
  Cyclic GFR-binding peptide
VVKDYEDFYLMSIANLET

SEQ ID NO: 11147 - protein, 17 aa, Artificial Sequence
  Cyclic GFR-binding peptide
VKPKRGVFYLISIANLA

SEQ ID NO: 11148 - protein, 16 aa, Artificial Sequence
  Cyclic GFR-binding peptide
  MOD_RES (14)..(15): Xaa is C or S
LYLISIASMKEPVXXP

SEQ ID NO: 11149 - protein, 14 aa, Artificial Sequence
  Cyclic GFR-binding peptide
  MOD_RES (14)..(14): Xaa is C or S
FYLISIANLDQSVX

SEQ ID NO: 11150 - protein, 16 aa, Artificial Sequence
  Cyclic GFR-binding peptide
  MOD_RES (14)..(15): Xaa is C or S
FYLISIANMKEPVXXP

SEQ ID NO: 11151 - protein, 14 aa, Artificial Sequence
  Cyclic GFR-binding peptide
  MOD_RES (14)..(14): Xaa is C or S
FYLISIANLDQPVX

SEQ ID NO: 11152 - protein, 13 aa, Artificial Sequence
  Cyclic GFR-binding peptide
FYLISIANLDQPV

SEQ ID NO: 11153 - protein, 16 aa, Artificial Sequence
  Cyclic GFR-binding peptide
IVNSSDDFYLVSIANL

SEQ ID NO: 11154 - protein, 15 aa, Artificial Sequence
  Cyclic GFR-binding peptide
  MOD_RES (14)..(15): Xaa is C or S
LYLISIASLKTPVXX

SEQ ID NO: 11155 - protein, 15 aa, Artificial Sequence
  Cyclic GFR-binding peptide
IVNNSSDFYLVSIAN

SEQ ID NO: 11156 - protein, 19 aa, Artificial Sequence
  Cyclic GFR-binding peptide
  MOD_RES (14)..(15): Xaa is C or S
FYLVSIANLKTPVXXAKGV

SEQ ID NO: 11157 - protein, 15 aa, Artificial Sequence
  Cyclic GFR-binding peptide
  MOD_RES (14)..(15): Xaa is C or S
LYLVSIASLKTPAXX

SEQ ID NO: 11158 - protein, 17 aa, Artificial Sequence
  Cyclic GFR-binding peptide
VVNNAADLYLISIASLR

SEQ ID NO: 11159 - protein, 19 aa, Artificial Sequence
  Cyclic GFR-binding peptide
VVNNASDFYLISIANLRTP

SEQ ID NO: 11160 - protein, 17 aa, Artificial Sequence
  Cyclic GFR-binding peptide
  MOD_RES (14)..(15): Xaa is C or S
FYLISIANMKEPVXXPE

SEQ ID NO: 11161 - protein, 16 aa, Artificial Sequence
  Cyclic GFR-binding peptide
  MOD_RES (14)..(15): Xaa is C or S
FYLVSIANLKTPVXXA

SEQ ID NO: 11162 - protein, 19 aa, Artificial Sequence
  Cyclic GFR-binding peptide
VVNNAADLYLISIASLRAP

SEQ ID NO: 11163 - protein, 17 aa, Artificial Sequence
  Cyclic GFR-binding peptide
  MOD_RES (14)..(15): Xaa is C or S
LYLMSIASTKVPAXXTS

SEQ ID NO: 11164 - protein, 17 aa, Artificial Sequence
  Cyclic GFR-binding peptide
  MOD_RES (14)..(15): Xaa is C or S
FYLVSIANLKTPAXXPK

SEQ ID NO: 11165 - protein, 18 aa, Artificial Sequence
  Cyclic GFR-binding peptide
  MOD_RES (14)..(15): Xaa is C or S
LYLVSIASLQTPAXXPKP

SEQ ID NO: 11166 - protein, 18 aa, Artificial Sequence
  Cyclic GFR-binding peptide
  MOD_RES (14)..(15): Xaa is C or S
FYLMSIANTKVPAXXTSP

SEQ ID NO: 11167 - protein, 15 aa, Artificial Sequence
  Cyclic GFR-binding peptide
  MOD_RES (14)..(15): Xaa is C or S
LYLVSIASLQTPAXX

SEQ ID NO: 11168 - protein, 18 aa, Artificial Sequence
  Cyclic GFR-binding peptide
VVNNASDLYLISIASLRT

SEQ ID NO: 11169 - protein, 20 aa, Artificial Sequence
  Cyclic GFR-binding peptide
  MOD_RES (14)..(15): Xaa is C or S
LYLMSIASLETPVXXAKPIK

SEQ ID NO: 11170 - protein, 20 aa, Artificial Sequence
  Cyclic GFR-binding peptide
  MOD_RES (14)..(15): Xaa is C or S
FYLISIANLAQPVXXPAASA

SEQ ID NO: 11171 - protein, 19 aa, Artificial Sequence
  Cyclic GFR-binding peptide
  MOD_RES (14)..(14): Xaa is C or S
LYLVSIASLKTPAXTPKTV

SEQ ID NO: 11172 - protein, 20 aa, Artificial Sequence
  Cyclic GFR-binding peptide
  MOD_RES (14)..(15): Xaa is C or S
LYLISIASLAQPVXXPAASA

SEQ ID NO: 11173 - protein, 18 aa, Artificial Sequence
  Cyclic GFR-binding peptide
  MOD_RES (14)..(15): Xaa is C or S
FYLISIANLDQSVXXPSA

SEQ ID NO: 11174 - protein, 16 aa, Artificial Sequence
  Cyclic GFR-binding peptide
  MOD_RES (14)..(15): Xaa is C or S
LYLISIASLRTPVXXT

SEQ ID NO: 11175 - protein, 16 aa, Artificial Sequence
  Cyclic GFR-binding peptide
  MOD_RES (14)..(15): Xaa is C or S
FYLMSIANTKVPAXXT

SEQ ID NO: 11176 - protein, 16 aa, Artificial Sequence
  Cyclic GFR-binding peptide
  MOD_RES (14)..(15): Xaa is C or S
LYLVSIASLKTPVXXA

SEQ ID NO: 11177 - protein, 18 aa, Artificial Sequence
  Cyclic GFR-binding peptide
  MOD_RES (14)..(14): Xaa is C or S
FYLVSIANLKTPAXTPKT

SEQ ID NO: 11178 - protein, 14 aa, Artificial Sequence
  Cyclic GFR-binding peptide
  MOD_RES (14)..(14): Xaa is C or S
FYLMSIANMKTPTX

SEQ ID NO: 11179 - protein, 15 aa, Artificial Sequence
  Cyclic GFR-binding peptide
VKPTRGVFYLISIAN

SEQ ID NO: 11180 - protein, 15 aa, Artificial Sequence
  Cyclic GFR-binding peptide
IVNSSDDLYLVSIAS

SEQ ID NO: 11181 - protein, 17 aa, Artificial Sequence
  Cyclic GFR-binding peptide
VKPTRGVLYLISIASLD

SEQ ID NO: 11182 - protein, 17 aa, Artificial Sequence
  Cyclic GFR-binding peptide
TPVGMDDFYLVSIANLK

SEQ ID NO: 11183 - protein, 27 aa, Artificial Sequence
  Cyclic GFR-binding peptide
  MOD_RES (21)..(22): Xaa is C or S
VKPKRGVFYLISIANLAQPVXXPAASA

SEQ ID NO: 11184 - protein, 15 aa, Artificial Sequence
  Cyclic GFR-binding peptide
  MOD_RES (14)..(15): Xaa is C or S
FYLVSIANLKTPAXX

SEQ ID NO: 11185 - protein, 15 aa, Artificial Sequence
  Cyclic GFR-binding peptide
LLVRGNDLYLMSIAS

SEQ ID NO: 11186 - protein, 17 aa, Artificial Sequence
  Cyclic GFR-binding peptide
  MOD_RES (14)..(15): Xaa is C or S
FYLISIANLKTPVXXAK

SEQ ID NO: 11187 - protein, 18 aa, Artificial Sequence
  Cyclic GFR-binding peptide
  MOD_RES (14)..(15): Xaa is C or S
LYLMSIASTKVPAXXTSP

SEQ ID NO: 11188 - protein, 15 aa, Artificial Sequence
  Cyclic GFR-binding peptide
IIQQKDNFYLMSIAN

SEQ ID NO: 11189 - protein, 18 aa, Artificial Sequence
  Cyclic GFR-binding peptide
IIQQKDNLYLMSIASMKT

SEQ ID NO: 11190 - protein, 17 aa, Artificial Sequence
  Cyclic GFR-binding peptide
  MOD_RES (14)..(15): Xaa is C or S
LYLISIASMKEPVXXPE

SEQ ID NO: 11191 - protein, 19 aa, Artificial Sequence
  Cyclic GFR-binding peptide
IVNSSDDFYLVSIANLQTP

SEQ ID NO: 11192 - protein, 16 aa, Artificial Sequence
  Cyclic GFR-binding peptide
VVNNAADFYLISIANL

SEQ ID NO: 11193 - protein, 27 aa, Artificial Sequence
  Cyclic GFR-binding peptide
  MOD_RES (21)..(21): Xaa is C or S
IVNSSDDFYLVSIANLKTPAXTPKTVH

SEQ ID NO: 11194 - protein, 18 aa, Artificial Sequence
  Cyclic GFR-binding peptide
  MOD_RES (14)..(14): Xaa is C or S
LYLVSIASLKTPAXTPKT

SEQ ID NO: 11195 - protein, 16 aa, Artificial Sequence
  Cyclic GFR-binding peptide
  MOD_RES (14)..(15): Xaa is C or S
LYLMSIASTKVPAXXT

SEQ ID NO: 11196 - protein, 18 aa, Artificial Sequence
  Cyclic GFR-binding peptide
  MOD_RES (14)..(15): Xaa is C or S
FYLVSIANLKTPAXXPKP

SEQ ID NO: 11197 - protein, 18 aa, Artificial Sequence
  Cyclic GFR-binding peptide
  MOD_RES (14)..(15): Xaa is C or S
LYLISIASLDQSVXXPSA

SEQ ID NO: 11198 - protein, 17 aa, Artificial Sequence
  Cyclic GFR-binding peptide
  MOD_RES (14)..(15): Xaa is C or S
LYLVSIASLQTPAXXPK

SEQ ID NO: 11199 - protein, 17 aa, Artificial Sequence
  Cyclic GFR-binding peptide
  MOD_RES (14)..(15): Xaa is C or S
FYLMSIANTKVPAXXTS

SEQ ID NO: 11200 - protein, 27 aa, Artificial Sequence
  Cyclic GFR-binding peptide
  MOD_RES (21)..(22): Xaa is C or S
IKPTKGIFYLISIANLDQSVXXPSASA

SEQ ID NO: 11201 - protein, 18 aa, Artificial Sequence
  Cyclic GFR-binding peptide
VVNKNEDLYLISIASMKE

SEQ ID NO: 11202 - protein, 13 aa, Artificial Sequence
  Cyclic GFR-binding peptide
FYLVSIANLKTPA

SEQ ID NO: 11203 - protein, 17 aa, Artificial Sequence
  Cyclic GFR-binding peptide
IKPTKGILYLISIASLD

SEQ ID NO: 11204 - protein, 27 aa, Artificial Sequence
  Cyclic GFR-binding peptide
  MOD_RES (21)..(22): Xaa is C or S
VVNNASDFYLISIANLRTPVXXTPPTS

SEQ ID NO: 11205 - protein, 19 aa, Artificial Sequence
  Cyclic GFR-binding peptide
VVKENEDFYLMSIANLETP

SEQ ID NO: 11206 - protein, 17 aa, Artificial Sequence
  Cyclic GFR-binding peptide
IVNNSSDFYLVSIANLK

SEQ ID NO: 11207 - protein, 27 aa, Artificial Sequence
  Cyclic GFR-binding peptide
  MOD_RES (21)..(22): Xaa is C or S
VVKENEDFYLMSIANLETPVXXAKPIK

SEQ ID NO: 11208 - protein, 14 aa, Artificial Sequence
  Cyclic GFR-binding peptide
  MOD_RES (14)..(14): Xaa is C or S
FYLISIANLAQPVX

SEQ ID NO: 11209 - protein, 16 aa, Artificial Sequence
  Cyclic GFR-binding peptide
  MOD_RES (14)..(15): Xaa is C or S
LYLMSIASMKTPTXXP

SEQ ID NO: 11210 - protein, 13 aa, Artificial Sequence
  Cyclic GFR-binding peptide
LYLISIASLKTPV

SEQ ID NO: 11211 - protein, 17 aa, Artificial Sequence
  Cyclic GFR-binding peptide
LLVRGNDFYLMSIANTK

SEQ ID NO: 11212 - protein, 27 aa, Artificial Sequence
  Cyclic GFR-binding peptide
  MOD_RES (21)..(22): Xaa is C or S
VKPTRGVFYLISIANLDQPVXXPSASA

SEQ ID NO: 11213 - protein, 19 aa, Artificial Sequence
  Cyclic GFR-binding peptide
IIQQKDNFYLMSIANMKTP

SEQ ID NO: 11214 - protein, 17 aa, Artificial Sequence
  Cyclic GFR-binding peptide
  MOD_RES (14)..(15): Xaa is C or S
LYLVSIASLKTPAXXAK

SEQ ID NO: 11215 - protein, 18 aa, Artificial Sequence
  Cyclic GFR-binding peptide
VVNKNEDFYLISIANMKE

SEQ ID NO: 11216 - protein, 17 aa, Artificial Sequence
  Cyclic GFR-binding peptide
IKPTKGIFYLISIANLD

SEQ ID NO: 11217 - protein, 27 aa, Artificial Sequence
  Cyclic GFR-binding peptide
  MOD_RES (21)..(22): Xaa is C or S
VVKENEDLYLMSIASLETPVXXAKPIK

SEQ ID NO: 11218 - protein, 17 aa, Artificial Sequence
  Cyclic GFR-binding peptide
LLVRGNDLYLMSIASTK

SEQ ID NO: 11219 - protein, 20 aa, Artificial Sequence
  Cyclic GFR-binding peptide
  MOD_RES (14)..(15): Xaa is C or S
FYLISIANMKEPVXXPEPIG

SEQ ID NO: 11220 - protein, 20 aa, Artificial Sequence
  Cyclic GFR-binding peptide
  MOD_RES (14)..(15): Xaa is C or S
FYLISIANLRAPVXXSAPAA

SEQ ID NO: 11221 - protein, 19 aa, Artificial Sequence
  Cyclic GFR-binding peptide
IIQQKDNLYLMSIASMKTP

SEQ ID NO: 11222 - protein, 27 aa, Artificial Sequence
  Cyclic GFR-binding peptide
  MOD_RES (21)..(22): Xaa is C or S
VVNNAADLYLISIASLRAPVXXSAPAA

SEQ ID NO: 11223 - protein, 15 aa, Artificial Sequence
  Cyclic GFR-binding peptide
  MOD_RES (14)..(15): Xaa is C or S
LYLMSIASLETPVXX

SEQ ID NO: 11224 - protein, 19 aa, Artificial Sequence
  Cyclic GFR-binding peptide
  MOD_RES (14)..(15): Xaa is C or S
FYLISIANLAQPVXXPAAS

SEQ ID NO: 11225 - protein, 19 aa, Artificial Sequence
  Cyclic GFR-binding peptide
VVKENEDLYLMSIASLETP

SEQ ID NO: 11226 - protein, 27 aa, Artificial Sequence
  Cyclic GFR-binding peptide
  MOD_RES (21)..(22): Xaa is C or S
VVNNASDLYLISIASLRTPVXXTPPTS

SEQ ID NO: 11227 - protein, 15 aa, Artificial Sequence
  Cyclic GFR-binding peptide
  MOD_RES (14)..(14): Xaa is C or S
FYLVSIANLKTPAXT

SEQ ID NO: 11228 - protein, 19 aa, Artificial Sequence
  Cyclic GFR-binding peptide
VKPKRGVLYLISIASLAQP

SEQ ID NO: 11229 - protein, 20 aa, Artificial Sequence
  Cyclic GFR-binding peptide
  MOD_RES (14)..(14): Xaa is C or S
FYLVSIANLKTPAXTPKTVH

SEQ ID NO: 11230 - protein, 27 aa, Artificial Sequence
  Cyclic GFR-binding peptide
  MOD_RES (21)..(22): Xaa is C or S
VKPTRGVLYLISIASLDQPVXXPSASA

SEQ ID NO: 11231 - protein, 16 aa, Artificial Sequence
  Cyclic GFR-binding peptide
VVKDYEDFYLMSIANL

SEQ ID NO: 11232 - protein, 18 aa, Artificial Sequence
  Cyclic GFR-binding peptide
  MOD_RES (14)..(15): Xaa is C or S
LYLISIASLRAPVXXSAP

SEQ ID NO: 11233 - protein, 19 aa, Artificial Sequence
  Cyclic GFR-binding peptide
TPVGMDDFYLVSIANLKTP

SEQ ID NO: 11234 - protein, 18 aa, Artificial Sequence
  Cyclic GFR-binding peptide
  MOD_RES (14)..(15): Xaa is C or S
LYLISIASMKEPVXXPEP

SEQ ID NO: 11235 - protein, 18 aa, Artificial Sequence
  Cyclic GFR-binding peptide
  MOD_RES (14)..(15): Xaa is C or S
LYLMSIASMKTPTXXPGA

SEQ ID NO: 11236 - protein, 16 aa, Artificial Sequence
  Cyclic GFR-binding peptide
  MOD_RES (14)..(15): Xaa is C or S
FYLVSIANLKTPAXXP

SEQ ID NO: 11237 - protein, 16 aa, Artificial Sequence
  Cyclic GFR-binding peptide
VKPKRGVLYLISIASL

SEQ ID NO: 11238 - protein, 16 aa, Artificial Sequence
  Cyclic GFR-binding peptide
VKPTRGVFYLISIANL

SEQ ID NO: 11239 - protein, 16 aa, Artificial Sequence
  Cyclic GFR-binding peptide
VVKDYEDLYLMSIASL

SEQ ID NO: 11240 - protein, 13 aa, Artificial Sequence
  Cyclic GFR-binding peptide
FYLVSIANLKTPV

SEQ ID NO: 11241 - protein, 17 aa, Artificial Sequence
  Cyclic GFR-binding peptide
VVKDYEDFYLMSIANLE

SEQ ID NO: 11242 - protein, 19 aa, Artificial Sequence
  Cyclic GFR-binding peptide
  MOD_RES (14)..(15): Xaa is C or S
FYLVSIANLKTPAXXAKPV

SEQ ID NO: 11243 - protein, 27 aa, Artificial Sequence
  Cyclic GFR-binding peptide
  MOD_RES (21)..(22): Xaa is C or S
IVNSSDDFYLVSIANLQTPAXXPKPVT

SEQ ID NO: 11244 - protein, 27 aa, Artificial Sequence
  Cyclic GFR-binding peptide
  MOD_RES (21)..(22): Xaa is C or S
LLVRGNDFYLMSIANTKVPAXXTSPVR

SEQ ID NO: 11245 - protein, 17 aa, Artificial Sequence
  Cyclic GFR-binding peptide
YTVVGKDLYLISIASLK

SEQ ID NO: 11246 - protein, 18 aa, Artificial Sequence
  Cyclic GFR-binding peptide
IVNSSDDLYLVSIASLKT

SEQ ID NO: 11247 - protein, 14 aa, Artificial Sequence
  Cyclic GFR-binding peptide
  MOD_RES (14)..(14): Xaa is C or S
LYLVSIASLKTPAX

SEQ ID NO: 11248 - protein, 19 aa, Artificial Sequence
  Cyclic GFR-binding peptide
  MOD_RES (14)..(15): Xaa is C or S
LYLVSIASLKTPAXXPKPV

SEQ ID NO: 11249 - protein, 19 aa, Artificial Sequence
  Cyclic GFR-binding peptide
  MOD_RES (14)..(15): Xaa is C or S
FYLMSIANLETPVXXAKPI

SEQ ID NO: 11250 - protein, 17 aa, Artificial Sequence
  Cyclic GFR-binding peptide
  MOD_RES (14)..(15): Xaa is C or S
LYLISIASLDQPVXXPS

SEQ ID NO: 11251 - protein, 17 aa, Artificial Sequence
  Cyclic GFR-binding peptide
VVKDYEDLYLMSIASLE

SEQ ID NO: 11252 - protein, 27 aa, Artificial Sequence
  Cyclic GFR-binding peptide
  MOD_RES (21)..(22): Xaa is C or S
IVNSSDDFYLVSIANLKTPAXXPKPVY

SEQ ID NO: 11253 - protein, 27 aa, Artificial Sequence
  Cyclic GFR-binding peptide
  MOD_RES (21)..(22): Xaa is C or S
IVNSSDDLYLVSIASLQTPAXXPKPVT

SEQ ID NO: 11254 - protein, 19 aa, Artificial Sequence
  Cyclic GFR-binding peptide
  MOD_RES (14)..(15): Xaa is C or S
FYLISIANLDQPVXXPSAS

SEQ ID NO: 11255 - protein, 27 aa, Artificial Sequence
  Cyclic GFR-binding peptide
  MOD_RES (21)..(22): Xaa is C or S
LLVRGNDLYLMSIASTKVPAXXTSPVR

SEQ ID NO: 11256 - protein, 20 aa, Artificial Sequence
  Cyclic GFR-binding peptide
  MOD_RES (14)..(15): Xaa is C or S
FYLMSIANLETPVXXAKPIS

SEQ ID NO: 11257 - protein, 19 aa, Artificial Sequence
  Cyclic GFR-binding peptide
  MOD_RES (14)..(15): Xaa is C or S
LYLVSIASLKTPVXXAKGV

SEQ ID NO: 11258 - protein, 17 aa, Artificial Sequence
  Cyclic GFR-binding peptide
YTVVGKDFYLISIANLK

SEQ ID NO: 11259 - protein, 18 aa, Artificial Sequence
  Cyclic GFR-binding peptide
IVNSSDDLYLVSIASLQT

SEQ ID NO: 11260 - protein, 20 aa, Artificial Sequence
  Cyclic GFR-binding peptide
  MOD_RES (14)..(15): Xaa is C or S
FYLVSIANLKTPAXXPKPVY

SEQ ID NO: 11261 - protein, 17 aa, Artificial Sequence
  Cyclic GFR-binding peptide
IVNNSSDLYLVSIASLK

SEQ ID NO: 11262 - protein, 16 aa, Artificial Sequence
  Cyclic GFR-binding peptide
  MOD_RES (14)..(15): Xaa is C or S
FYLMSIANLETPVXXA

SEQ ID NO: 11263 - protein, 19 aa, Artificial Sequence
  Cyclic GFR-binding peptide
TPVGMDDLYLVSIASLKTP

SEQ ID NO: 11264 - protein, 15 aa, Artificial Sequence
  Cyclic GFR-binding peptide
  MOD_RES (14)..(15): Xaa is C or S
LYLISIASLDQPVXX

SEQ ID NO: 11265 - protein, 27 aa, Artificial Sequence
  Cyclic GFR-binding peptide
  MOD_RES (21)..(22): Xaa is C or S
IVNSSDDLYLVSIASLKTPAXXPKPVY

SEQ ID NO: 11266 - protein, 17 aa, Artificial Sequence
  Cyclic GFR-binding peptide
  MOD_RES (14)..(15): Xaa is C or S
LYLVSIASLKTPVXXAK

SEQ ID NO: 11267 - protein, 20 aa, Artificial Sequence
  Cyclic GFR-binding peptide
  MOD_RES (14)..(15): Xaa is C or S
FYLISIANLKTPVXXAKSAK

SEQ ID NO: 11268 - protein, 20 aa, Artificial Sequence
  Cyclic GFR-binding peptide
  MOD_RES (14)..(15): Xaa is C or S
LYLVSIASLKTPAXXAKPVA

SEQ ID NO: 11269 - protein, 19 aa, Artificial Sequence
  Cyclic GFR-binding peptide
VVNNASDLYLISIASLRTP

SEQ ID NO: 11270 - protein, 20 aa, Artificial Sequence
  Cyclic GFR-binding peptide
  MOD_RES (14)..(15): Xaa is C or S
LYLVSIASLKTPAXXPKPVH

SEQ ID NO: 11271 - protein, 19 aa, Artificial Sequence
  Cyclic GFR-binding peptide
IVNSSDDLYLVSIASLQTP

SEQ ID NO: 11272 - protein, 18 aa, Artificial Sequence
  Cyclic GFR-binding peptide
VKPTRGVFYLISIANLDQ

SEQ ID NO: 11273 - protein, 18 aa, Artificial Sequence
  Cyclic GFR-binding peptide
VVNNAADLYLISIASLRA

SEQ ID NO: 11274 - protein, 13 aa, Artificial Sequence
  Cyclic GFR-binding peptide
LYLMSIASLETPV

SEQ ID NO: 11275 - protein, 16 aa, Artificial Sequence
  Cyclic GFR-binding peptide
IVNNSSDFYLVSIANL

SEQ ID NO: 11276 - protein, 16 aa, Artificial Sequence
  Cyclic GFR-binding peptide
  MOD_RES (14)..(15): Xaa is C or S
LYLISIASLKTPVXXA

SEQ ID NO: 11277 - protein, 16 aa, Artificial Sequence
  Cyclic GFR-binding peptide
  MOD_RES (14)..(15): Xaa is C or S
FYLVSIANLKTPAXXA

SEQ ID NO: 11278 - protein, 16 aa, Artificial Sequence
  Cyclic GFR-binding peptide
  MOD_RES (14)..(15): Xaa is C or S
FYLISIANLKTPVXXA

SEQ ID NO: 11279 - protein, 17 aa, Artificial Sequence
  Cyclic GFR-binding peptide
  MOD_RES (14)..(15): Xaa is C or S
LYLISIASLAQPVXXPA

SEQ ID NO: 11280 - protein, 19 aa, Artificial Sequence
  Cyclic GFR-binding peptide
LLVRGNDFYLMSIANTKVP

SEQ ID NO: 11281 - protein, 16 aa, Artificial Sequence
  Cyclic GFR-binding peptide
LLVRGNDLYLMSIAST

SEQ ID NO: 11282 - protein, 19 aa, Artificial Sequence
  Cyclic GFR-binding peptide
VKPTRGVFYLISIANLDQP

SEQ ID NO: 11283 - protein, 15 aa, Artificial Sequence
  Cyclic GFR-binding peptide
  MOD_RES (14)..(15): Xaa is C or S
LYLVSIASLKTPVXX

SEQ ID NO: 11284 - protein, 16 aa, Artificial Sequence
  Cyclic GFR-binding peptide
  MOD_RES (14)..(14): Xaa is C or S
LYLVSIASLKTPAXTP

SEQ ID NO: 11285 - protein, 15 aa, Artificial Sequence
  Cyclic GFR-binding peptide
IVNNSSDLYLVSIAS

SEQ ID NO: 11286 - protein, 14 aa, Artificial Sequence
  Cyclic GFR-binding peptide
  MOD_RES (14)..(14): Xaa is C or S
LYLISIASLDQSVX

SEQ ID NO: 11287 - protein, 15 aa, Artificial Sequence
  Cyclic GFR-binding peptide
  MOD_RES (14)..(15): Xaa is C or S
FYLVSIANLKTPVXX

SEQ ID NO: 11288 - protein, 16 aa, Artificial Sequence
  Cyclic GFR-binding peptide
  MOD_RES (14)..(14): Xaa is C or S
FYLVSIANLKTPAXTP

SEQ ID NO: 11289 - protein, 16 aa, Artificial Sequence
  Cyclic GFR-binding peptide
VKPTRGVLYLISIASL

SEQ ID NO: 11290 - protein, 17 aa, Artificial Sequence
  Cyclic GFR-binding peptide
  MOD_RES (14)..(15): Xaa is C or S
FYLISIANLRAPVXXSA

SEQ ID NO: 11291 - protein, 17 aa, Artificial Sequence
  Cyclic GFR-binding peptide
  MOD_RES (14)..(15): Xaa is C or S
LYLMSIASLETPVXXAK

SEQ ID NO: 11292 - protein, 16 aa, Artificial Sequence
  Cyclic GFR-binding peptide
  MOD_RES (14)..(15): Xaa is C or S
LYLISIASLDQPVXXP

SEQ ID NO: 11293 - protein, 20 aa, Artificial Sequence
  Cyclic GFR-binding peptide
  MOD_RES (14)..(15): Xaa is C or S
LYLVSIASLKTPVXXAKGVK

SEQ ID NO: 11294 - protein, 20 aa, Artificial Sequence
  Cyclic GFR-binding peptide
  MOD_RES (14)..(15): Xaa is C or S
LYLISIASLDQSVXXPSASA

SEQ ID NO: 11295 - protein, 13 aa, Artificial Sequence
  Cyclic GFR-binding peptide
FYLMSIANMKTPT

SEQ ID NO: 11296 - protein, 20 aa, Artificial Sequence
  Cyclic GFR-binding peptide
  MOD_RES (14)..(15): Xaa is C or S
FYLMSIANTKVPAXXTSPVR

SEQ ID NO: 11297 - protein, 19 aa, Artificial Sequence
  Cyclic GFR-binding peptide
  MOD_RES (14)..(15): Xaa is C or S
FYLVSIANLKTPAXXPKPV

SEQ ID NO: 11298 - protein, 19 aa, Artificial Sequence
  Cyclic GFR-binding peptide
  MOD_RES (14)..(15): Xaa is C or S
FYLISIANLKTPVXXAKSA

SEQ ID NO: 11299 - protein, 18 aa, Artificial Sequence
  Cyclic GFR-binding peptide
  MOD_RES (14)..(15): Xaa is C or S
FYLISIANLAQPVXXPAA

SEQ ID NO: 11300 - protein, 17 aa, Artificial Sequence
  Cyclic GFR-binding peptide
VKPKRGVLYLISIASLA

SEQ ID NO: 11301 - protein, 13 aa, Artificial Sequence
  Cyclic GFR-binding peptide
LYLMSIASMKTPT

SEQ ID NO: 11302 - protein, 16 aa, Artificial Sequence
  Cyclic GFR-binding peptide
VVNNAADLYLISIASL

SEQ ID NO: 11303 - protein, 15 aa, Artificial Sequence
  Cyclic GFR-binding peptide
  MOD_RES (14)..(15): Xaa is C or S
FYLISIANLDQSVXX

SEQ ID NO: 11304 - protein, 19 aa, Artificial Sequence
  Cyclic GFR-binding peptide
VKPKRGVFYLISIANLAQP

SEQ ID NO: 11305 - protein, 15 aa, Artificial Sequence
  Cyclic GFR-binding peptide
VKPTRGVLYLISIAS

SEQ ID NO: 11306 - protein, 14 aa, Artificial Sequence
  Cyclic GFR-binding peptide
  MOD_RES (14)..(14): Xaa is C or S
FYLISIANLRTPVX

SEQ ID NO: 11307 - protein, 17 aa, Artificial Sequence
  Cyclic GFR-binding peptide
  MOD_RES (14)..(14): Xaa is C or S
FYLVSIANLKTPAXTPK

SEQ ID NO: 11308 - protein, 14 aa, Artificial Sequence
  Cyclic GFR-binding peptide
  MOD_RES (14)..(14): Xaa is C or S
LYLISIASLRTPVX

SEQ ID NO: 11309 - protein, 27 aa, Artificial Sequence
  Cyclic GFR-binding peptide
  MOD_RES (21)..(22): Xaa is C or S
VVNNAADFYLISIANLRAPVXXSAPAA

SEQ ID NO: 11310 - protein, 13 aa, Artificial Sequence
  Cyclic GFR-binding peptide
LYLVSIASLKTPV

SEQ ID NO: 11311 - protein, 16 aa, Artificial Sequence
  Cyclic GFR-binding peptide
  MOD_RES (14)..(15): Xaa is C or S
LYLVSIASLKTPAXXP

SEQ ID NO: 11312 - protein, 15 aa, Artificial Sequence
  Cyclic GFR-binding peptide
VVKDYEDFYLMSIAN

SEQ ID NO: 11313 - protein, 15 aa, Artificial Sequence
  Cyclic GFR-binding peptide
VVKENEDLYLMSIAS

SEQ ID NO: 11314 - protein, 27 aa, Artificial Sequence
  Cyclic GFR-binding peptide
  MOD_RES (21)..(21): Xaa is C or S
IVNSSDDLYLVSIASLKTPAXTPKTVH

SEQ ID NO: 11315 - protein, 20 aa, Artificial Sequence
  Cyclic GFR-binding peptide
  MOD_RES (14)..(15): Xaa is C or S
FYLISIANLDQSVXXPSASA

SEQ ID NO: 11316 - protein, 19 aa, Artificial Sequence
  Cyclic GFR-binding peptide
  MOD_RES (14)..(15): Xaa is C or S
FYLMSIANTKVPAXXTSPV

SEQ ID NO: 11317 - protein, 18 aa, Artificial Sequence
  Cyclic GFR-binding peptide
TPVGMDDLYLVSIASLKT

SEQ ID NO: 11318 - protein, 15 aa, Artificial Sequence
  Cyclic GFR-binding peptide
  MOD_RES (14)..(15): Xaa is C or S
LYLMSIASMKTPTXX

SEQ ID NO: 11319 - protein, 13 aa, Artificial Sequence
  Cyclic GFR-binding peptide
FYLISIANLDQSV

SEQ ID NO: 11320 - protein, 14 aa, Artificial Sequence
  Cyclic GFR-binding peptide
  MOD_RES (14)..(14): Xaa is C or S
LYLVSIASLQTPAX

SEQ ID NO: 11321 - protein, 16 aa, Artificial Sequence
  Cyclic GFR-binding peptide
VVNKNEDLYLISIASM

SEQ ID NO: 11322 - protein, 15 aa, Artificial Sequence
  Cyclic GFR-binding peptide
YTVVGKDLYLISIAS

SEQ ID NO: 11323 - protein, 18 aa, Artificial Sequence
  Cyclic GFR-binding peptide
  MOD_RES (14)..(15): Xaa is C or S
FYLISIANLDQPVXXPSA

SEQ ID NO: 11324 - protein, 18 aa, Artificial Sequence
  Cyclic GFR-binding peptide
IIQQKDNFYLMSIANMKT

SEQ ID NO: 11325 - protein, 19 aa, Artificial Sequence
  Cyclic GFR-binding peptide
IVNSSDDLYLVSIASLKTP

SEQ ID NO: 11326 - protein, 16 aa, Artificial Sequence
  Cyclic GFR-binding peptide
  MOD_RES (14)..(15): Xaa is C or S
FYLISIANLDQPVXXP

SEQ ID NO: 11327 - protein, 18 aa, Artificial Sequence
  Cyclic GFR-binding peptide
  MOD_RES (14)..(15): Xaa is C or S
FYLISIANLRTPVXXTPP

SEQ ID NO: 11328 - protein, 16 aa, Artificial Sequence
  Cyclic GFR-binding peptide
  MOD_RES (14)..(15): Xaa is C or S
FYLMSIANMKTPTXXP

SEQ ID NO: 11329 - protein, 19 aa, Artificial Sequence
  Cyclic GFR-binding peptide
IKPTKGILYLISIASLDQS

SEQ ID NO: 11330 - protein, 19 aa, Artificial Sequence
  Cyclic GFR-binding peptide
  MOD_RES (14)..(15): Xaa is C or S
FYLISIANMKEPVXXPEPI

SEQ ID NO: 11331 - protein, 20 aa, Artificial Sequence
  Cyclic GFR-binding peptide
  MOD_RES (14)..(15): Xaa is C or S
LYLISIASMKEPVXXPEPIG

SEQ ID NO: 11332 - protein, 15 aa, Artificial Sequence
  Cyclic GFR-binding peptide
TPVGMDDFYLVSIAN

SEQ ID NO: 11333 - protein, 20 aa, Artificial Sequence
  Cyclic GFR-binding peptide
  MOD_RES (14)..(15): Xaa is C or S
LYLISIASLRAPVXXSAPAA

SEQ ID NO: 11334 - protein, 27 aa, Artificial Sequence
  Cyclic GFR-binding peptide
  MOD_RES (21)..(22): Xaa is C or S
VVNKNEDFYLISIANMKEPVXXPEPIG

SEQ ID NO: 11335 - protein, 18 aa, Artificial Sequence
  Cyclic GFR-binding peptide
VVKENEDFYLMSIANLET

SEQ ID NO: 11336 - protein, 27 aa, Artificial Sequence
  Cyclic GFR-binding peptide
  MOD_RES (21)..(22): Xaa is C or S
VVKDYEDLYLMSIASLETPVXXAKPIS

SEQ ID NO: 11337 - protein, 19 aa, Artificial Sequence
  Cyclic GFR-binding peptide
  MOD_RES (14)..(15): Xaa is C or S
FYLISIANLDQSVXXPSAS

SEQ ID NO: 11338 - protein, 19 aa, Artificial Sequence
  Cyclic GFR-binding peptide
IKPTKGIFYLISIANLDQS

SEQ ID NO: 11339 - protein, 17 aa, Artificial Sequence
  Cyclic GFR-binding peptide
VVNNASDLYLISIASLR

SEQ ID NO: 11340 - protein, 18 aa, Artificial Sequence
  Cyclic GFR-binding peptide
VVKENEDLYLMSIASLET

SEQ ID NO: 11341 - protein, 19 aa, Artificial Sequence
  Cyclic GFR-binding peptide
VVNKNEDFYLISIANMKEP

SEQ ID NO: 11342 - protein, 18 aa, Artificial Sequence
  Cyclic GFR-binding peptide
VKPKRGVFYLISIANLAQ

SEQ ID NO: 11343 - protein, 16 aa, Artificial Sequence
  Cyclic GFR-binding peptide
IKPTKGIFYLISIANL

SEQ ID NO: 11344 - protein, 27 aa, Artificial Sequence
  Cyclic GFR-binding peptide
  MOD_RES (21)..(22): Xaa is C or S
YTVVGKDLYLISIASLKTPVXXAKSAK

SEQ ID NO: 11345 - protein, 19 aa, Artificial Sequence
  Cyclic GFR-binding peptide
VVNKNEDLYLISIASMKEP

SEQ ID NO: 11346 - protein, 20 aa, Artificial Sequence
  Cyclic GFR-binding peptide
  MOD_RES (14)..(15): Xaa is C or S
LYLVSIASLKTPAXXPKPVY

SEQ ID NO: 11347 - protein, 16 aa, Artificial Sequence
  Cyclic GFR-binding peptide
  MOD_RES (14)..(15): Xaa is C or S
FYLISIANLAQPVXXP

SEQ ID NO: 11348 - protein, 20 aa, Artificial Sequence
  Cyclic GFR-binding peptide
  MOD_RES (14)..(15): Xaa is C or S
LYLMSIASLETPVXXAKPIS

SEQ ID NO: 11349 - protein, 18 aa, Artificial Sequence
  Cyclic GFR-binding peptide
VKPKRGVLYLISIASLAQ

SEQ ID NO: 11350 - protein, 14 aa, Artificial Sequence
  Cyclic GFR-binding peptide
  MOD_RES (14)..(14): Xaa is C or S
FYLISIANMKEPVX

SEQ ID NO: 11351 - protein, 17 aa, Artificial Sequence
  Cyclic GFR-binding peptide
  MOD_RES (14)..(15): Xaa is C or S
LYLISIASLRTPVXXTP

SEQ ID NO: 11352 - protein, 19 aa, Artificial Sequence
  Cyclic GFR-binding peptide
  MOD_RES (14)..(15): Xaa is C or S
FYLISIANLRTPVXXTPPT

SEQ ID NO: 11353 - protein, 15 aa, Artificial Sequence
  Cyclic GFR-binding peptide
  MOD_RES (14)..(15): Xaa is C or S
LYLISIASLDQSVXX

SEQ ID NO: 11354 - protein, 20 aa, Artificial Sequence
  Cyclic GFR-binding peptide
  MOD_RES (14)..(15): Xaa is C or S
FYLVSIANLKTPVXXAKGVK

SEQ ID NO: 11355 - protein, 17 aa, Artificial Sequence
  Cyclic GFR-binding peptide
  MOD_RES (14)..(15): Xaa is C or S
FYLMSIANMKTPTXXPG

SEQ ID NO: 11356 - protein, 20 aa, Artificial Sequence
  Cyclic GFR-binding peptide
  MOD_RES (14)..(15): Xaa is C or S
FYLISIANLRTPVXXTPPTS

SEQ ID NO: 11357 - protein, 27 aa, Artificial Sequence
  Cyclic GFR-binding peptide
  MOD_RES (21)..(22): Xaa is C or S
YTVVGKDFYLISIANLKTPVXXAKSAK

SEQ ID NO: 11358 - protein, 19 aa, Artificial Sequence
  Cyclic GFR-binding peptide
  MOD_RES (14)..(15): Xaa is C or S
LYLMSIASLETPVXXAKPI

SEQ ID NO: 11359 - protein, 17 aa, Artificial Sequence
  Cyclic GFR-binding peptide
  MOD_RES (14)..(15): Xaa is C or S
LYLISIASLRAPVXXSA

SEQ ID NO: 11360 - protein, 13 aa, Artificial Sequence
  Cyclic GFR-binding peptide
FYLISIANLRTPV

SEQ ID NO: 11361 - protein, 19 aa, Artificial Sequence
  Cyclic GFR-binding peptide
  MOD_RES (14)..(15): Xaa is C or S
LYLISIASLAQPVXXPAAS

SEQ ID NO: 11362 - protein, 15 aa, Artificial Sequence
  Cyclic GFR-binding peptide
  MOD_RES (14)..(15): Xaa is C or S
FYLMSIANLETPVXX

SEQ ID NO: 11363 - protein, 16 aa, Artificial Sequence
  Cyclic GFR-binding peptide
YTVVGKDFYLISIANL

SEQ ID NO: 11364 - protein, 20 aa, Artificial Sequence
  Cyclic GFR-binding peptide
  MOD_RES (14)..(15): Xaa is C or S
LYLISIASLDQPVXXPSASA

SEQ ID NO: 11365 - protein, 19 aa, Artificial Sequence
  Cyclic GFR-binding peptide
  MOD_RES (14)..(15): Xaa is C or S
LYLISIASLKTPVXXAKSA

SEQ ID NO: 11366 - protein, 16 aa, Artificial Sequence
  Cyclic GFR-binding peptide
YTVVGKDLYLISIASL

SEQ ID NO: 11367 - protein, 14 aa, Artificial Sequence
  Cyclic GFR-binding peptide
  MOD_RES (14)..(14): Xaa is C or S
LYLISIASLRAPVX

SEQ ID NO: 11368 - protein, 15 aa, Artificial Sequence
  Cyclic GFR-binding peptide
  MOD_RES (14)..(14): Xaa is C or S
LYLVSIASLKTPAXT

SEQ ID NO: 11369 - protein, 19 aa, Artificial Sequence
  Cyclic GFR-binding peptide
  MOD_RES (14)..(15): Xaa is C or S
LYLMSIASMKTPTXXPGAS

SEQ ID NO: 11370 - protein, 18 aa, Artificial Sequence
  Cyclic GFR-binding peptide
IVNSSDDFYLVSIANLQT

SEQ ID NO: 11371 - protein, 16 aa, Artificial Sequence
  Cyclic GFR-binding peptide
VVNKNEDFYLISIANM

SEQ ID NO: 11372 - protein, 15 aa, Artificial Sequence
  Cyclic GFR-binding peptide
  MOD_RES (14)..(15): Xaa is C or S
LYLISIASLRTPVXX

SEQ ID NO: 11373 - protein, 13 aa, Artificial Sequence
  Cyclic GFR-binding peptide
FYLMSIANLETPV

SEQ ID NO: 11374 - protein, 19 aa, Artificial Sequence
  Cyclic GFR-binding peptide
  MOD_RES (14)..(15): Xaa is C or S
FYLMSIANMKTPTXXPGAS

SEQ ID NO: 11375 - protein, 18 aa, Artificial Sequence
  Cyclic GFR-binding peptide
VKPTRGVLYLISIASLDQ

SEQ ID NO: 11376 - protein, 18 aa, Artificial Sequence
  Cyclic GFR-binding peptide
VVNNAADFYLISIANLRA

SEQ ID NO: 11377 - protein, 18 aa, Artificial Sequence
  Cyclic GFR-binding peptide
IVNSSDDFYLVSIANLKT

SEQ ID NO: 11378 - protein, 18 aa, Artificial Sequence
  Cyclic GFR-binding peptide
  MOD_RES (14)..(15): Xaa is C or S
FYLISIANLKTPVXXAKS

SEQ ID NO: 11379 - protein, 16 aa, Artificial Sequence
  Cyclic GFR-binding peptide
IVNNSSDLYLVSIASL

SEQ ID NO: 11380 - protein, 15 aa, Artificial Sequence
  Cyclic GFR-binding peptide
VKPKRGVLYLISIAS

SEQ ID NO: 11381 - protein, 19 aa, Artificial Sequence
  Cyclic GFR-binding peptide
LLVRGNDLYLMSIASTKVP

SEQ ID NO: 11382 - protein, 15 aa, Artificial Sequence
  Cyclic GFR-binding peptide
  MOD_RES (14)..(15): Xaa is C or S
FYLISIANLRTPVXX

SEQ ID NO: 11383 - protein, 16 aa, Artificial Sequence
  Cyclic GFR-binding peptide
  MOD_RES (14)..(15): Xaa is C or S
FYLISIANLDQSVXXP

SEQ ID NO: 11384 - protein, 16 aa, Artificial Sequence
  Cyclic GFR-binding peptide
VKPKRGVFYLISIANL

SEQ ID NO: 11385 - protein, 14 aa, Artificial Sequence
  Cyclic GFR-binding peptide
  MOD_RES (14)..(14): Xaa is C or S
FYLISIANLRAPVX

SEQ ID NO: 11386 - protein, 14 aa, Artificial Sequence
  Cyclic GFR-binding peptide
  MOD_RES (14)..(14): Xaa is C or S
FYLMSIANLETPVX

SEQ ID NO: 11387 - protein, 17 aa, Artificial Sequence
  Cyclic GFR-binding peptide
  MOD_RES (14)..(15): Xaa is C or S
LYLISIASLDQSVXXPS

SEQ ID NO: 11388 - protein, 20 aa, Artificial Sequence
  Cyclic GFR-binding peptide
  MOD_RES (14)..(15): Xaa is C or S
FYLISIANLDQPVXXPSASA

SEQ ID NO: 11389 - protein, 15 aa, Artificial Sequence
  Cyclic GFR-binding peptide
VVNKNEDLYLISIAS

SEQ ID NO: 11390 - protein, 15 aa, Artificial Sequence
  Cyclic GFR-binding peptide
VVKDYEDLYLMSIAS

SEQ ID NO: 11391 - protein, 14 aa, Artificial Sequence
  Cyclic GFR-binding peptide
  MOD_RES (14)..(14): Xaa is C or S
FYLVSIANLKTPVX

SEQ ID NO: 11392 - protein, 19 aa, Artificial Sequence
  Cyclic GFR-binding peptide
YTVVGKDLYLISIASLKTP

SEQ ID NO: 11393 - protein, 16 aa, Artificial Sequence
  Cyclic GFR-binding peptide
VVNNASDFYLISIANL

SEQ ID NO: 11394 - protein, 13 aa, Artificial Sequence
  Cyclic GFR-binding peptide
LYLMSIASTKVPA

SEQ ID NO: 11395 - protein, 14 aa, Artificial Sequence
  Cyclic GFR-binding peptide
  MOD_RES (14)..(14): Xaa is C or S
LYLVSIASLKTPVX

SEQ ID NO: 11396 - protein, 15 aa, Artificial Sequence
  Cyclic GFR-binding peptide
VVKENEDFYLMSIAN

SEQ ID NO: 11397 - protein, 18 aa, Artificial Sequence
  Cyclic GFR-binding peptide
IKPTKGIFYLISIANLDQ

SEQ ID NO: 11398 - protein, 13 aa, Artificial Sequence
  Cyclic GFR-binding peptide
FYLMSIANTKVPA

SEQ ID NO: 11399 - protein, 18 aa, Artificial Sequence
  Cyclic GFR-binding peptide
TPVGMDDFYLVSIANLKT

SEQ ID NO: 11400 - protein, 17 aa, Artificial Sequence
  Cyclic GFR-binding peptide
  MOD_RES (14)..(15): Xaa is C or S
FYLISIANLRTPVXXTP

SEQ ID NO: 11401 - protein, 16 aa, Artificial Sequence
  Cyclic GFR-binding peptide
  MOD_RES (14)..(15): Xaa is C or S
LYLISIASLDQSVXXP

SEQ ID NO: 11402 - protein, 15 aa, Artificial Sequence
  Cyclic GFR-binding peptide
  MOD_RES (14)..(15): Xaa is C or S
LYLMSIASTKVPAXX

SEQ ID NO: 11403 - protein, 19 aa, Artificial Sequence
  Cyclic GFR-binding peptide
IVNNSSDLYLVSIASLKTP

SEQ ID NO: 11404 - protein, 18 aa, Artificial Sequence
  Cyclic GFR-binding peptide
  MOD_RES (14)..(15): Xaa is C or S
LYLISIASLKTPVXXAKS

SEQ ID NO: 11405 - protein, 27 aa, Artificial Sequence
  Cyclic GFR-binding peptide
  MOD_RES (21)..(22): Xaa is C or S
IIQQKDNFYLMSIANMKTPTXXPGASG

SEQ ID NO: 11406 - protein, 17 aa, Artificial Sequence
  Cyclic GFR-binding peptide
IIQQKDNLYLMSIASMK

SEQ ID NO: 11407 - protein, 17 aa, Artificial Sequence
  Cyclic GFR-binding peptide
VVNKNEDFYLISIANMK

SEQ ID NO: 11408 - protein, 18 aa, Artificial Sequence
  Cyclic GFR-binding peptide
  MOD_RES (14)..(15): Xaa is C or S
LYLISIASLRTPVXXTPP

SEQ ID NO: 11409 - protein, 17 aa, Artificial Sequence
  Cyclic GFR-binding peptide
  MOD_RES (14)..(15): Xaa is C or S
FYLISIANLDQSVXXPS

SEQ ID NO: 11410 - protein, 14 aa, Artificial Sequence
  Cyclic GFR-binding peptide
  MOD_RES (14)..(14): Xaa is C or S
LYLMSIASLETPVX

SEQ ID NO: 11411 - protein, 19 aa, Artificial Sequence
  Cyclic GFR-binding peptide
VVKDYEDFYLMSIANLETP

SEQ ID NO: 11412 - protein, 15 aa, Artificial Sequence
  Cyclic GFR-binding peptide
IKPTKGIFYLISIAN

SEQ ID NO: 11413 - protein, 13 aa, Artificial Sequence
  Cyclic GFR-binding peptide
LYLVSIASLQTPA

SEQ ID NO: 11414 - protein, 16 aa, Artificial Sequence
  Cyclic GFR-binding peptide
IIQQKDNLYLMSIASM

SEQ ID NO: 11415 - protein, 27 aa, Artificial Sequence
  Cyclic GFR-binding peptide
  MOD_RES (21)..(22): Xaa is C or S
TPVGMDDFYLVSIANLKTPVXXAKGVK

SEQ ID NO: 11416 - protein, 14 aa, Artificial Sequence
  Cyclic GFR-binding peptide
  MOD_RES (14)..(14): Xaa is C or S
FYLISIANLKTPVX

SEQ ID NO: 11417 - protein, 27 aa, Artificial Sequence
  Cyclic GFR-binding peptide
  MOD_RES (21)..(22): Xaa is C or S
TPVGMDDLYLVSIASLKTPVXXAKGVK

SEQ ID NO: 11418 - protein, 17 aa, Artificial Sequence
  Cyclic GFR-binding peptide
IVNSSDDLYLVSIASLK

SEQ ID NO: 11419 - protein, 16 aa, Artificial Sequence
  Cyclic GFR-binding peptide
IIQQKDNFYLMSIANM

SEQ ID NO: 11420 - protein, 19 aa, Artificial Sequence
  Cyclic GFR-binding peptide
  MOD_RES (14)..(15): Xaa is C or S
LYLISIASLDQSVXXPSAS

SEQ ID NO: 11421 - protein, 16 aa, Artificial Sequence
  Cyclic GFR-binding peptide
VVKENEDLYLMSIASL

SEQ ID NO: 11422 - protein, 15 aa, Artificial Sequence
  Cyclic GFR-binding peptide
  MOD_RES (14)..(15): Xaa is C or S
FYLMSIANTKVPAXX

SEQ ID NO: 11423 - protein, 15 aa, Artificial Sequence
  Cyclic GFR-binding peptide
  MOD_RES (14)..(15): Xaa is C or S
LYLISIASLRAPVXX

SEQ ID NO: 11424 - protein, 13 aa, Artificial Sequence
  Cyclic GFR-binding peptide
LYLISIASLRTPV

SEQ ID NO: 11425 - protein, 13 aa, Artificial Sequence
  Cyclic GFR-binding peptide
LYLISIASLAQPV

SEQ ID NO: 11426 - protein, 16 aa, Artificial Sequence
  Cyclic GFR-binding peptide
TPVGMDDFYLVSIANL

SEQ ID NO: 11427 - protein, 15 aa, Artificial Sequence
  Cyclic GFR-binding peptide
IKPTKGILYLISIAS

SEQ ID NO: 11428 - protein, 19 aa, Artificial Sequence
  Cyclic GFR-binding peptide
  MOD_RES (14)..(15): Xaa is C or S
LYLISIASMKEPVXXPEPI

SEQ ID NO: 11429 - protein, 14 aa, Artificial Sequence
  Cyclic GFR-binding peptide
  MOD_RES (14)..(14): Xaa is C or S
LYLISIASMKEPVX

SEQ ID NO: 11430 - protein, 18 aa, Artificial Sequence
  Cyclic GFR-binding peptide
YTVVGKDFYLISIANLKT

SEQ ID NO: 11431 - protein, 20 aa, Artificial Sequence
  Cyclic GFR-binding peptide
  MOD_RES (14)..(15): Xaa is C or S
LYLISIASLRTPVXXTPPTS

SEQ ID NO: 11432 - protein, 14 aa, Artificial Sequence
  Cyclic GFR-binding peptide
  MOD_RES (14)..(14): Xaa is C or S
LYLMSIASTKVPAX

SEQ ID NO: 11433 - protein, 18 aa, Artificial Sequence
  Cyclic GFR-binding peptide
  MOD_RES (14)..(15): Xaa is C or S
FYLVSIANLKTPAXXAKP

SEQ ID NO: 11434 - protein, 17 aa, Artificial Sequence
  Cyclic GFR-binding peptide
IVNSSDDFYLVSIANLQ

SEQ ID NO: 11435 - protein, 18 aa, Artificial Sequence
  Cyclic GFR-binding peptide
YTVVGKDLYLISIASLKT

SEQ ID NO: 11436 - protein, 17 aa, Artificial Sequence
  Cyclic GFR-binding peptide
IVNSSDDFYLVSIANLK

SEQ ID NO: 11437 - protein, 27 aa, Artificial Sequence
  Cyclic GFR-binding peptide
  MOD_RES (21)..(22): Xaa is C or S
IVNSSDDLYLVSIASLKTPAXXPKPVH

SEQ ID NO: 11438 - protein, 17 aa, Artificial Sequence
  Cyclic GFR-binding peptide
IVNSSDDLYLVSIASLQ

SEQ ID NO: 11439 - protein, 15 aa, Artificial Sequence
  Cyclic GFR-binding peptide
VVNNASDFYLISIAN

SEQ ID NO: 11440 - protein, 19 aa, Artificial Sequence
  Cyclic GFR-binding peptide
  MOD_RES (14)..(15): Xaa is C or S
LYLISIASLRTPVXXTPPT

SEQ ID NO: 11441 - protein, 16 aa, Artificial Sequence
  Cyclic GFR-binding peptide
  MOD_RES (14)..(15): Xaa is C or S
FYLISIANLRAPVXXS

SEQ ID NO: 11442 - protein, 15 aa, Artificial Sequence
  Cyclic GFR-binding peptide
VVNNAADLYLISIAS

SEQ ID NO: 11443 - protein, 27 aa, Artificial Sequence
  Cyclic GFR-binding peptide
  MOD_RES (21)..(22): Xaa is C or S
IVNSSDDFYLVSIANLKTPAXXPKPVH

SEQ ID NO: 11444 - protein, 18 aa, Artificial Sequence
  Cyclic GFR-binding peptide
IVNNSSDFYLVSIANLKT

SEQ ID NO: 11445 - protein, 16 aa, Artificial Sequence
  Cyclic GFR-binding peptide
VVKENEDFYLMSIANL

SEQ ID NO: 11446 - protein, 15 aa, Artificial Sequence
  Cyclic GFR-binding peptide
VVNNASDLYLISIAS

SEQ ID NO: 11447 - protein, 20 aa, Artificial Sequence
  Cyclic GFR-binding peptide
  MOD_RES (14)..(15): Xaa is C or S
LYLMSIASTKVPAXXTSPVR

SEQ ID NO: 11448 - protein, 16 aa, Artificial Sequence
  Cyclic GFR-binding peptide
  MOD_RES (14)..(15): Xaa is C or S
LYLISIASLAQPVXXP

SEQ ID NO: 11449 - protein, 19 aa, Artificial Sequence
  Cyclic GFR-binding peptide
  MOD_RES (14)..(15): Xaa is C or S
FYLISIANLRAPVXXSAPA

SEQ ID NO: 11450 - protein, 16 aa, Artificial Sequence
  Cyclic GFR-binding peptide
  MOD_RES (14)..(15): Xaa is C or S
LYLVSIASLQTPAXXP

SEQ ID NO: 11451 - protein, 15 aa, Artificial Sequence
  Cyclic GFR-binding peptide
VVNNAADFYLISIAN

SEQ ID NO: 11452 - protein, 18 aa, Artificial Sequence
  Cyclic GFR-binding peptide
VVKDYEDLYLMSIASLET

SEQ ID NO: 11453 - protein, 18 aa, Artificial Sequence
  Cyclic GFR-binding peptide
IVNNSSDLYLVSIASLKT

SEQ ID NO: 11454 - protein, 13 aa, Artificial Sequence
  Cyclic GFR-binding peptide
LYLISIASLRAPV

SEQ ID NO: 11455 - protein, 15 aa, Artificial Sequence
  Cyclic GFR-binding peptide
  MOD_RES (14)..(15): Xaa is C or S
FYLISIANMKEPVXX

SEQ ID NO: 11456 - protein, 20 aa, Artificial Sequence
  Cyclic GFR-binding peptide
  MOD_RES (14)..(15): Xaa is C or S
LYLMSIASMKTPTXXPGASG

SEQ ID NO: 11457 - protein, 13 aa, Artificial Sequence
  Cyclic GFR-binding peptide
FYLISIANLRAPV

SEQ ID NO: 11458 - protein, 20 aa, Artificial Sequence
  Cyclic GFR-binding peptide
  MOD_RES (14)..(15): Xaa is C or S
FYLVSIANLKTPAXXPKPVH

SEQ ID NO: 11459 - protein, 15 aa, Artificial Sequence
  Cyclic GFR-binding peptide
VKPKRGVFYLISIAN

SEQ ID NO: 11460 - protein, 19 aa, Artificial Sequence
  Cyclic GFR-binding peptide
VVKDYEDLYLMSIASLETP

SEQ ID NO: 11461 - protein, 18 aa, Artificial Sequence
  Cyclic GFR-binding peptide
VVNNASDFYLISIANLRT

SEQ ID NO: 11462 - protein, 16 aa, Artificial Sequence
  Cyclic GFR-binding peptide
IVNSSDDLYLVSIASL

SEQ ID NO: 11463 - protein, 20 aa, Artificial Sequence
  Cyclic GFR-binding peptide
  MOD_RES (14)..(15): Xaa is C or S
FYLMSIANMKTPTXXPGASG

SEQ ID NO: 11464 - protein, 15 aa, Artificial Sequence
  Cyclic GFR-binding peptide
  MOD_RES (14)..(15): Xaa is C or S
LYLISIASMKEPVXX

SEQ ID NO: 11465 - protein, 19 aa, Artificial Sequence
  Cyclic GFR-binding peptide
VVNNAADFYLISIANLRAP

SEQ ID NO: 11466 - protein, 13 aa, Artificial Sequence
  Cyclic GFR-binding peptide
LYLISIASLDQSV

SEQ ID NO: 11467 - protein, 19 aa, Artificial Sequence
  Cyclic GFR-binding peptide
  MOD_RES (14)..(15): Xaa is C or S
LYLISIASLRAPVXXSAPA

SEQ ID NO: 11468 - protein, 17 aa, Artificial Sequence
  Cyclic GFR-binding peptide
VVKENEDLYLMSIASLE

SEQ ID NO: 11469 - protein, 17 aa, Artificial Sequence
  Cyclic GFR-binding peptide
  MOD_RES (14)..(15): Xaa is C or S
FYLISIANLDQPVXXPS

SEQ ID NO: 11470 - protein, 20 aa, Artificial Sequence
  Cyclic GFR-binding peptide
  MOD_RES (14)..(15): Xaa is C or S
FYLVSIANLKTPAXXAKPVA

SEQ ID NO: 11471 - protein, 16 aa, Artificial Sequence
  Cyclic GFR-binding peptide
  MOD_RES (14)..(15): Xaa is C or S
LYLVSIASLKTPAXXA

SEQ ID NO: 11472 - protein, 18 aa, Artificial Sequence
  Cyclic GFR-binding peptide
  MOD_RES (14)..(15): Xaa is C or S
LYLISIASLDQPVXXPSA

SEQ ID NO: 11473 - protein, 19 aa, Artificial Sequence
  Cyclic GFR-binding peptide
  MOD_RES (14)..(15): Xaa is C or S
LYLMSIASTKVPAXXTSPV

SEQ ID NO: 11474 - protein, 15 aa, Artificial Sequence
  Cyclic GFR-binding peptide
  MOD_RES (14)..(15): Xaa is C or S
LYLISIASLAQPVXX

SEQ ID NO: 11475 - protein, 18 aa, Artificial Sequence
  Cyclic GFR-binding peptide
  MOD_RES (14)..(15): Xaa is C or S
LYLVSIASLKTPVXXAKG

SEQ ID NO: 11476 - protein, 17 aa, Artificial Sequence
  Cyclic GFR-binding peptide
VVNNAADFYLISIANLR

SEQ ID NO: 11477 - protein, 18 aa, Artificial Sequence
  Cyclic GFR-binding peptide
  MOD_RES (14)..(15): Xaa is C or S
FYLISIANLRAPVXXSAP

SEQ ID NO: 11478 - protein, 17 aa, Artificial Sequence
  Cyclic GFR-binding peptide
  MOD_RES (14)..(15): Xaa is C or S
LYLMSIASMKTPTXXPG

SEQ ID NO: 11479 - protein, 15 aa, Artificial Sequence
  Cyclic GFR-binding peptide
IVNSSDDFYLVSIAN

SEQ ID NO: 11480 - protein, 27 aa, Artificial Sequence
  Cyclic GFR-binding peptide
  MOD_RES (21)..(22): Xaa is C or S
VKPKRGVLYLISIASLAQPVXXPAASA

SEQ ID NO: 11481 - protein, 14 aa, Artificial Sequence
  Cyclic GFR-binding peptide
  MOD_RES (14)..(14): Xaa is C or S
FYLMSIANTKVPAX

SEQ ID NO: 11482 - protein, 18 aa, Artificial Sequence
  Cyclic GFR-binding peptide
  MOD_RES (14)..(15): Xaa is C or S
FYLMSIANLETPVXXAKP

SEQ ID NO: 11483 - protein, 17 aa, Artificial Sequence
  Cyclic GFR-binding peptide
TPVGMDDLYLVSIASLK

SEQ ID NO: 11484 - protein, 19 aa, Artificial Sequence
  Cyclic GFR-binding peptide
YTVVGKDFYLISIANLKTP

SEQ ID NO: 11485 - protein, 13 aa, Artificial Sequence
  Cyclic GFR-binding peptide
LYLISIASMKEPV

SEQ ID NO: 11486 - protein, 18 aa, Artificial Sequence
  Cyclic GFR-binding peptide
IKPTKGILYLISIASLDQ

SEQ ID NO: 11487 - protein, 16 aa, Artificial Sequence
  Cyclic GFR-binding peptide
TPVGMDDLYLVSIASL

SEQ ID NO: 11488 - protein, 27 aa, Artificial Sequence
  Cyclic GFR-binding peptide
  MOD_RES (21)..(22): Xaa is C or S
VVNKNEDLYLISIASMKEPVXXPEPIG

SEQ ID NO: 11489 - protein, 17 aa, Artificial Sequence
  Cyclic GFR-binding peptide
IIQQKDNFYLMSIANMK

SEQ ID NO: 11490 - protein, 27 aa, Artificial Sequence
  Cyclic GFR-binding peptide
  MOD_RES (21)..(22): Xaa is C or S
IVNNSSDFYLVSIANLKTPAXXAKPVA

SEQ ID NO: 11491 - protein, 13 aa, Artificial Sequence
  Cyclic GFR-binding peptide
FYLISIANMKEPV

SEQ ID NO: 11492 - protein, 18 aa, Artificial Sequence
  Cyclic GFR-binding peptide
  MOD_RES (14)..(15): Xaa is C or S
FYLVSIANLKTPVXXAKG

SEQ ID NO: 11493 - protein, 27 aa, Artificial Sequence
  Cyclic GFR-binding peptide
  MOD_RES (21)..(22): Xaa is C or S
IKPTKGILYLISIASLDQSVXXPSASA

SEQ ID NO: 11494 - protein, 15 aa, Artificial Sequence
  Cyclic GFR-binding peptide
  MOD_RES (14)..(15): Xaa is C or S
FYLISIANLRAPVXX

SEQ ID NO: 11495 - protein, 17 aa, Artificial Sequence
  Cyclic GFR-binding peptide
VKPTRGVFYLISIANLD

SEQ ID NO: 11496 - protein, 17 aa, Artificial Sequence
  Cyclic GFR-binding peptide
  MOD_RES (14)..(15): Xaa is C or S
FYLMSIANLETPVXXAK

SEQ ID NO: 11497 - protein, 15 aa, Artificial Sequence
  Cyclic GFR-binding peptide
IIQQKDNLYLMSIAS

SEQ ID NO: 11498 - protein, 14 aa, Artificial Sequence
  Cyclic GFR-binding peptide
  MOD_RES (14)..(14): Xaa is C or S
LYLISIASLKTPVX

SEQ ID NO: 11499 - protein, 17 aa, Artificial Sequence
  Cyclic GFR-binding peptide
  MOD_RES (14)..(15): Xaa is C or S
FYLISIANLAQPVXXPA

SEQ ID NO: 11500 - protein, 15 aa, Artificial Sequence
  Cyclic GFR-binding peptide
VVNKNEDFYLISIAN

SEQ ID NO: 11501 - protein, 20 aa, Artificial Sequence
  Cyclic GFR-binding peptide
  MOD_RES (14)..(15): Xaa is C or S
LYLVSIASLQTPAXXPKPVT

SEQ ID NO: 11502 - protein, 18 aa, Artificial Sequence
  Cyclic GFR-binding peptide
  MOD_RES (14)..(15): Xaa is C or S
LYLMSIASLETPVXXAKP

SEQ ID NO: 11503 - protein, 18 aa, Artificial Sequence
  Cyclic GFR-binding peptide
  MOD_RES (14)..(15): Xaa is C or S
LYLISIASLAQPVXXPAA

SEQ ID NO: 11504 - protein, 19 aa, Artificial Sequence
  Cyclic GFR-binding peptide
  MOD_RES (14)..(15): Xaa is C or S
LYLVSIASLQTPAXXPKPV

SEQ ID NO: 11505 - protein, 16 aa, Artificial Sequence
  Cyclic GFR-binding peptide
VVNNASDLYLISIASL

SEQ ID NO: 11506 - protein, 27 aa, Artificial Sequence
  Cyclic GFR-binding peptide
  MOD_RES (21)..(22): Xaa is C or S
IIQQKDNLYLMSIASMKTPTXXPGASG

SEQ ID NO: 11507 - protein, 15 aa, Artificial Sequence
  Cyclic GFR-binding peptide
LLVRGNDFYLMSIAN

SEQ ID NO: 11508 - protein, 19 aa, Artificial Sequence
  Cyclic GFR-binding peptide
IVNNSSDFYLVSIANLKTP

SEQ ID NO: 11509 - protein, 14 aa, Artificial Sequence
  Cyclic GFR-binding peptide
  MOD_RES (14)..(14): Xaa is C or S
LYLISIASLAQPVX

SEQ ID NO: 11510 - protein, 20 aa, Artificial Sequence
  Cyclic GFR-binding peptide
  MOD_RES (14)..(14): Xaa is C or S
LYLVSIASLKTPAXTPKTVH

SEQ ID NO: 11511 - protein, 17 aa, Artificial Sequence
  Cyclic GFR-binding peptide
VVNKNEDLYLISIASMK

SEQ ID NO: 11512 - protein, 13 aa, Artificial Sequence
  Cyclic GFR-binding peptide
LYLVSIASLKTPA

SEQ ID NO: 11513 - protein, 27 aa, Artificial Sequence
  Cyclic GFR-binding peptide
  MOD_RES (21)..(22): Xaa is C or S
IVNNSSDLYLVSIASLKTPAXXAKPVA

SEQ ID NO: 11514 - protein, 17 aa, Artificial Sequence
  Cyclic GFR-binding peptide
  MOD_RES (14)..(15): Xaa is C or S
FYLVSIANLKTPAXXAK

SEQ ID NO: 11515 - protein, 19 aa, Artificial Sequence
  Cyclic GFR-binding peptide
  MOD_RES (14)..(15): Xaa is C or S
LYLVSIASLKTPAXXAKPV

SEQ ID NO: 11516 - protein, 15 aa, Artificial Sequence
  Cyclic GFR-binding peptide
TPVGMDDLYLVSIAS

SEQ ID NO: 11517 - protein, 16 aa, Artificial Sequence
  Cyclic GFR-binding peptide
  MOD_RES (14)..(15): Xaa is C or S
LYLISIASLRAPVXXS

SEQ ID NO: 11518 - protein, 14 aa, Artificial Sequence
  Cyclic GFR-binding peptide
  MOD_RES (14)..(14): Xaa is C or S
FYLVSIANLKTPAX

SEQ ID NO: 11519 - protein, 17 aa, Artificial Sequence
  Cyclic GFR-binding peptide
  MOD_RES (14)..(15): Xaa is C or S
LYLISIASLKTPVXXAK

SEQ ID NO: 11520 - protein, 27 aa, Artificial Sequence
  Cyclic GFR-binding peptide
  MOD_RES (21)..(22): Xaa is C or S
VVKDYEDFYLMSIANLETPVXXAKPIS

SEQ ID NO: 11521 - protein, 14 aa, Artificial Sequence
  Cyclic GFR-binding peptide
  MOD_RES (14)..(14): Xaa is C or S
LYLMSIASMKTPTX

SEQ ID NO: 11522 - protein, 19 aa, Artificial Sequence
  Cyclic GFR-binding peptide
  MOD_RES (14)..(15): Xaa is C or S
LYLISIASLDQPVXXPSAS

SEQ ID NO: 11523 - protein, 17 aa, Artificial Sequence
  Cyclic GFR-binding peptide
  MOD_RES (14)..(15): Xaa is C or S
FYLVSIANLKTPVXXAK

SEQ ID NO: 11524 - protein, 16 aa, Artificial Sequence
  Cyclic GFR-binding peptide
IKPTKGILYLISIASL

SEQ ID NO: 11525 - protein, 16 aa, Artificial Sequence
  Cyclic GFR-binding peptide
  MOD_RES (14)..(15): Xaa is C or S
LYLMSIASLETPVXXA

SEQ ID NO: 11526 - protein, 15 aa, Artificial Sequence
  Cyclic GFR-binding peptide
  MOD_RES (14)..(15): Xaa is C or S
FYLMSIANMKTPTXX

SEQ ID NO: 11527 - protein, 20 aa, Artificial Sequence
  Cyclic GFR-binding peptide
  MOD_RES (14)..(15): Xaa is C or S
LYLISIASLKTPVXXAKSAK

SEQ ID NO: 11528 - protein, 19 aa, Artificial Sequence
  Cyclic GFR-binding peptide
  MOD_RES (14)..(14): Xaa is C or S
FYLVSIANLKTPAXTPKTV

SEQ ID NO: 11529 - protein, 17 aa, Artificial Sequence
  Cyclic GFR-binding peptide
  MOD_RES (14)..(14): Xaa is C or S
LYLVSIASLKTPAXTPK

SEQ ID NO: 11530 - protein, 15 aa, Artificial Sequence
  Cyclic GFR-binding peptide
  MOD_RES (14)..(15): Xaa is C or S
FYLISIANLDQPVXX

SEQ ID NO: 11531 - protein, 18 aa, Artificial Sequence
  Cyclic GFR-binding peptide
  MOD_RES (14)..(15): Xaa is C or S
FYLISIANMKEPVXXPEP

SEQ ID NO: 11532 - protein, 17 aa, Artificial Sequence
  Cyclic GFR-binding peptide
VVNNASDFYLISIANLR

SEQ ID NO: 11533 - protein, 16 aa, Artificial Sequence
  Cyclic GFR-binding peptide
  MOD_RES (14)..(15): Xaa is C or S
FYLISIANLRTPVXXT

SEQ ID NO: 11534 - protein, 20 aa, Artificial Sequence
  Cyclic GFR-binding peptide
  MOD_RES (14)..(15): Xaa is C or S
FYLMSIANLETPVXXAKPIK

SEQ ID NO: 11535 - protein, 17 aa, Artificial Sequence
  Cyclic GFR-binding peptide
VVKENEDFYLMSIANLE

SEQ ID NO: 11536 - protein, 18 aa, Artificial Sequence
  Cyclic GFR-binding peptide
LLVRGNDLYLMSIASTKV

SEQ ID NO: 11537 - protein, 17 aa, Artificial Sequence
  Cyclic GFR-binding peptide
  MOD_RES (14)..(15): Xaa is C or S
LYLVSIASLKTPAXXPK

SEQ ID NO: 11538 - protein, 18 aa, Artificial Sequence
  Cyclic GFR-binding peptide
  MOD_RES (14)..(15): Xaa is C or S
LYLVSIASLKTPAXXAKP

SEQ ID NO: 11539 - protein, 13 aa, Artificial Sequence
  Cyclic GFR-binding peptide
FYLISIANLKTPV

SEQ ID NO: 11540 - protein, 18 aa, Artificial Sequence
  Cyclic GFR-binding peptide
  MOD_RES (14)..(15): Xaa is C or S
FYLMSIANMKTPTXXPGA

SEQ ID NO: 11541 - protein, 15 aa, Artificial Sequence
  Cyclic GFR-binding peptide
  MOD_RES (14)..(15): Xaa is C or S
FYLISIANLKTPVXX

SEQ ID NO: 11542 - protein, 15 aa, Artificial Sequence
  Cyclic GFR-binding peptide
  MOD_RES (14)..(15): Xaa is C or S
FYLISIANLAQPVXX

SEQ ID NO: 11543 - protein, 13 aa, Artificial Sequence
  Cyclic GFR-binding peptide
LYLISIASLDQPV

SEQ ID NO: 11544 - protein, 13 aa, Artificial Sequence
  Cyclic GFR-binding peptide
FYLISIANLAQPV

SEQ ID NO: 11545 - protein, 18 aa, Artificial Sequence
  Cyclic GFR-binding peptide
LLVRGNDFYLMSIANTKV

SEQ ID NO: 11546 - protein, 19 aa, Artificial Sequence
  Cyclic GFR-binding peptide
VKPTRGVLYLISIASLDQP

SEQ ID NO: 11547 - protein, 16 aa, Artificial Sequence
  Cyclic GFR-binding peptide
LLVRGNDFYLMSIANT

SEQ ID NO: 11548 - protein, 14 aa, Artificial Sequence
  Cyclic GFR-binding peptide
  MOD_RES (14)..(14): Xaa is C or S
LYLISIASLDQPVX

SEQ ID NO: 11549 - protein, 19 aa, Artificial Sequence
  Cyclic GFR-binding peptide
IVNSSDDFYLVSIANLKTP

SEQ ID NO: 11550 - protein, 15 aa, Artificial Sequence
  Cyclic GFR-binding peptide
YTVVGKDFYLISIAN

SEQ ID NO: 11551 - protein, 18 aa, Artificial Sequence
  Cyclic GFR-binding peptide
  MOD_RES (14)..(15): Xaa is C or S
LYLVSIASLKTPAXXPKP

SEQ ID NO: 11552 - protein, 18 aa, Artificial Sequence
  Cyclic GFR-binding peptide
VVKDYEDFYLMSIANLET

SEQ ID NO: 11553 - protein, 17 aa, Artificial Sequence
  Cyclic GFR-binding peptide
VKPKRGVFYLISIANLA

SEQ ID NO: 11554 - protein, 16 aa, Artificial Sequence
  Cyclic GFR-binding peptide
  MOD_RES (14)..(15): Xaa is C or S
LYLISIASMKEPVXXP

SEQ ID NO: 11555 - protein, 14 aa, Artificial Sequence
  Cyclic GFR-binding peptide
  MOD_RES (14)..(14): Xaa is C or S
FYLISIANLDQSVX

SEQ ID NO: 11556 - protein, 16 aa, Artificial Sequence
  Cyclic GFR-binding peptide
  MOD_RES (14)..(15): Xaa is C or S
FYLISIANMKEPVXXP

SEQ ID NO: 11557 - protein, 14 aa, Artificial Sequence
  Cyclic GFR-binding peptide
  MOD_RES (14)..(14): Xaa is C or S
FYLISIANLDQPVX

SEQ ID NO: 11558 - protein, 13 aa, Artificial Sequence
  Cyclic GFR-binding peptide
FYLISIANLDQPV

SEQ ID NO: 11559 - protein, 16 aa, Artificial Sequence
  Cyclic GFR-binding peptide
IVNSSDDFYLVSIANL

SEQ ID NO: 11560 - protein, 15 aa, Artificial Sequence
  Cyclic GFR-binding peptide
  MOD_RES (14)..(15): Xaa is C or S
LYLISIASLKTPVXX

SEQ ID NO: 11561 - protein, 15 aa, Artificial Sequence
  Cyclic GFR-binding peptide
IVNNSSDFYLVSIAN

SEQ ID NO: 11562 - protein, 19 aa, Artificial Sequence
  Cyclic GFR-binding peptide
  MOD_RES (14)..(15): Xaa is C or S
FYLVSIANLKTPVXXAKGV

SEQ ID NO: 11563 - protein, 15 aa, Artificial Sequence
  Cyclic GFR-binding peptide
  MOD_RES (14)..(15): Xaa is C or S
LYLVSIASLKTPAXX

SEQ ID NO: 11564 - protein, 17 aa, Artificial Sequence
  Cyclic GFR-binding peptide
VVNNAADLYLISIASLR

SEQ ID NO: 11565 - protein, 19 aa, Artificial Sequence
  Cyclic GFR-binding peptide
VVNNASDFYLISIANLRTP

SEQ ID NO: 11566 - protein, 17 aa, Artificial Sequence
  Cyclic GFR-binding peptide
  MOD_RES (14)..(15): Xaa is C or S
FYLISIANMKEPVXXPE

SEQ ID NO: 11567 - protein, 16 aa, Artificial Sequence
  Cyclic GFR-binding peptide
  MOD_RES (14)..(15): Xaa is C or S
FYLVSIANLKTPVXXA

SEQ ID NO: 11568 - protein, 19 aa, Artificial Sequence
  Cyclic GFR-binding peptide
VVNNAADLYLISIASLRAP

SEQ ID NO: 11569 - protein, 17 aa, Artificial Sequence
  Cyclic GFR-binding peptide
  MOD_RES (14)..(15): Xaa is C or S
LYLMSIASTKVPAXXTS

SEQ ID NO: 11570 - protein, 17 aa, Artificial Sequence
  Cyclic GFR-binding peptide
  MOD_RES (14)..(15): Xaa is C or S
FYLVSIANLKTPAXXPK

SEQ ID NO: 11571 - protein, 18 aa, Artificial Sequence
  Cyclic GFR-binding peptide
  MOD_RES (14)..(15): Xaa is C or S
LYLVSIASLQTPAXXPKP

SEQ ID NO: 11572 - protein, 18 aa, Artificial Sequence
  Cyclic GFR-binding peptide
  MOD_RES (14)..(15): Xaa is C or S
FYLMSIANTKVPAXXTSP

SEQ ID NO: 11573 - protein, 15 aa, Artificial Sequence
  Cyclic GFR-binding peptide
  MOD_RES (14)..(15): Xaa is C or S
LYLVSIASLQTPAXX

SEQ ID NO: 11574 - protein, 18 aa, Artificial Sequence
  Cyclic GFR-binding peptide
VVNNASDLYLISIASLRT

SEQ ID NO: 11575 - protein, 20 aa, Artificial Sequence
  Cyclic GFR-binding peptide
  MOD_RES (14)..(15): Xaa is C or S
LYLMSIASLETPVXXAKPIK

SEQ ID NO: 11576 - protein, 20 aa, Artificial Sequence
  Cyclic GFR-binding peptide
  MOD_RES (14)..(15): Xaa is C or S
FYLISIANLAQPVXXPAASA

SEQ ID NO: 11577 - protein, 19 aa, Artificial Sequence
  Cyclic GFR-binding peptide
  MOD_RES (14)..(14): Xaa is C or S
LYLVSIASLKTPAXTPKTV

SEQ ID NO: 11578 - protein, 20 aa, Artificial Sequence
  Cyclic GFR-binding peptide
  MOD_RES (14)..(15): Xaa is C or S
LYLISIASLAQPVXXPAASA

SEQ ID NO: 11579 - protein, 18 aa, Artificial Sequence
  Cyclic GFR-binding peptide
  MOD_RES (14)..(15): Xaa is C or S
FYLISIANLDQSVXXPSA

SEQ ID NO: 11580 - protein, 16 aa, Artificial Sequence
  Cyclic GFR-binding peptide
  MOD_RES (14)..(15): Xaa is C or S
LYLISIASLRTPVXXT

SEQ ID NO: 11581 - protein, 16 aa, Artificial Sequence
  Cyclic GFR-binding peptide
  MOD_RES (14)..(15): Xaa is C or S
FYLMSIANTKVPAXXT

SEQ ID NO: 11582 - protein, 16 aa, Artificial Sequence
  Cyclic GFR-binding peptide
  MOD_RES (14)..(15): Xaa is C or S
LYLVSIASLKTPVXXA

SEQ ID NO: 11583 - protein, 18 aa, Artificial Sequence
  Cyclic GFR-binding peptide
  MOD_RES (14)..(14): Xaa is C or S
FYLVSIANLKTPAXTPKT

SEQ ID NO: 11584 - protein, 14 aa, Artificial Sequence
  Cyclic GFR-binding peptide
  MOD_RES (14)..(14): Xaa is C or S
FYLMSIANMKTPTX

SEQ ID NO: 11585 - protein, 15 aa, Artificial Sequence
  Cyclic GFR-binding peptide
VKPTRGVFYLISIAN

SEQ ID NO: 11586 - protein, 15 aa, Artificial Sequence
  Cyclic GFR-binding peptide
IVNSSDDLYLVSIAS

SEQ ID NO: 11587 - protein, 17 aa, Artificial Sequence
  Cyclic GFR-binding peptide
VKPTRGVLYLISIASLD

SEQ ID NO: 11588 - protein, 17 aa, Artificial Sequence
  Cyclic GFR-binding peptide
TPVGMDDFYLVSIANLK

SEQ ID NO: 11589 - protein, 27 aa, Artificial Sequence
  Cyclic GFR-binding peptide
  MOD_RES (21)..(22): Xaa is C or S
VKPKRGVFYLISIANLAQPVXXPAASA

SEQ ID NO: 11590 - protein, 15 aa, Artificial Sequence
  Cyclic GFR-binding peptide
  MOD_RES (14)..(15): Xaa is C or S
FYLVSIANLKTPAXX

SEQ ID NO: 11591 - protein, 15 aa, Artificial Sequence
  Cyclic GFR-binding peptide
LLVRGNDLYLMSIAS

SEQ ID NO: 11592 - protein, 17 aa, Artificial Sequence
  Cyclic GFR-binding peptide
  MOD_RES (14)..(15): Xaa is C or S
FYLISIANLKTPVXXAK

SEQ ID NO: 11593 - protein, 18 aa, Artificial Sequence
  Cyclic GFR-binding peptide
  MOD_RES (14)..(15): Xaa is C or S
LYLMSIASTKVPAXXTSP

SEQ ID NO: 11594 - protein, 15 aa, Artificial Sequence
  Cyclic GFR-binding peptide
IIQQKDNFYLMSIAN

SEQ ID NO: 11595 - protein, 18 aa, Artificial Sequence
  Cyclic GFR-binding peptide
IIQQKDNLYLMSIASMKT

SEQ ID NO: 11596 - protein, 17 aa, Artificial Sequence
  Cyclic GFR-binding peptide
  MOD_RES (14)..(15): Xaa is C or S
LYLISIASMKEPVXXPE

SEQ ID NO: 11597 - protein, 19 aa, Artificial Sequence
  Cyclic GFR-binding peptide
IVNSSDDFYLVSIANLQTP

SEQ ID NO: 11598 - protein, 16 aa, Artificial Sequence
  Cyclic GFR-binding peptide
VVNNAADFYLISIANL

SEQ ID NO: 11599 - protein, 27 aa, Artificial Sequence
  Cyclic GFR-binding peptide
  MOD_RES (21)..(21): Xaa is C or S
IVNSSDDFYLVSIANLKTPAXTPKTVH

SEQ ID NO: 11600 - protein, 18 aa, Artificial Sequence
  Cyclic GFR-binding peptide
  MOD_RES (14)..(14): Xaa is C or S
LYLVSIASLKTPAXTPKT

SEQ ID NO: 11601 - protein, 16 aa, Artificial Sequence
  Cyclic GFR-binding peptide
  MOD_RES (14)..(15): Xaa is C or S
LYLMSIASTKVPAXXT

SEQ ID NO: 11602 - protein, 18 aa, Artificial Sequence
  Cyclic GFR-binding peptide
  MOD_RES (14)..(15): Xaa is C or S
FYLVSIANLKTPAXXPKP

SEQ ID NO: 11603 - protein, 18 aa, Artificial Sequence
  Cyclic GFR-binding peptide
  MOD_RES (14)..(15): Xaa is C or S
LYLISIASLDQSVXXPSA

SEQ ID NO: 11604 - protein, 17 aa, Artificial Sequence
  Cyclic GFR-binding peptide
  MOD_RES (14)..(15): Xaa is C or S
LYLVSIASLQTPAXXPK

SEQ ID NO: 11605 - protein, 17 aa, Artificial Sequence
  Cyclic GFR-binding peptide
  MOD_RES (14)..(15): Xaa is C or S
FYLMSIANTKVPAXXTS

SEQ ID NO: 11606 - protein, 27 aa, Artificial Sequence
  Cyclic GFR-binding peptide
  MOD_RES (21)..(22): Xaa is C or S
IKPTKGIFYLISIANLDQSVXXPSASA

SEQ ID NO: 11607 - protein, 18 aa, Artificial Sequence
  Cyclic GFR-binding peptide
VVNKNEDLYLISIASMKE

SEQ ID NO: 11608 - protein, 13 aa, Artificial Sequence
  Cyclic GFR-binding peptide
FYLVSIANLKTPA

SEQ ID NO: 11609 - protein, 17 aa, Artificial Sequence
  Cyclic GFR-binding peptide
IKPTKGILYLISIASLD

SEQ ID NO: 11610 - protein, 27 aa, Artificial Sequence
  Cyclic GFR-binding peptide
  MOD_RES (21)..(22): Xaa is C or S
VVNNASDFYLISIANLRTPVXXTPPTS

SEQ ID NO: 11611 - protein, 19 aa, Artificial Sequence
  Cyclic GFR-binding peptide
VVKENEDFYLMSIANLETP

SEQ ID NO: 11612 - protein, 17 aa, Artificial Sequence
  Cyclic GFR-binding peptide
IVNNSSDFYLVSIANLK

SEQ ID NO: 11613 - protein, 27 aa, Artificial Sequence
  Cyclic GFR-binding peptide
  MOD_RES (21)..(22): Xaa is C or S
VVKENEDFYLMSIANLETPVXXAKPIK

SEQ ID NO: 11614 - protein, 14 aa, Artificial Sequence
  Cyclic GFR-binding peptide
  MOD_RES (14)..(14): Xaa is C or S
FYLISIANLAQPVX

SEQ ID NO: 11615 - protein, 16 aa, Artificial Sequence
  Cyclic GFR-binding peptide
  MOD_RES (14)..(15): Xaa is C or S
LYLMSIASMKTPTXXP

SEQ ID NO: 11616 - protein, 13 aa, Artificial Sequence
  Cyclic GFR-binding peptide
LYLISIASLKTPV

SEQ ID NO: 11617 - protein, 17 aa, Artificial Sequence
  Cyclic GFR-binding peptide
LLVRGNDFYLMSIANTK

SEQ ID NO: 11618 - protein, 27 aa, Artificial Sequence
  Cyclic GFR-binding peptide
  MOD_RES (21)..(22): Xaa is C or S
VKPTRGVFYLISIANLDQPVXXPSASA

SEQ ID NO: 11619 - protein, 19 aa, Artificial Sequence
  Cyclic GFR-binding peptide
IIQQKDNFYLMSIANMKTP

SEQ ID NO: 11620 - protein, 17 aa, Artificial Sequence
  Cyclic GFR-binding peptide
  MOD_RES (14)..(15): Xaa is C or S
LYLVSIASLKTPAXXAK

SEQ ID NO: 11621 - protein, 18 aa, Artificial Sequence
  Cyclic GFR-binding peptide
VVNKNEDFYLISIANMKE

SEQ ID NO: 11622 - protein, 17 aa, Artificial Sequence
  Cyclic GFR-binding peptide
IKPTKGIFYLISIANLD

SEQ ID NO: 11623 - protein, 27 aa, Artificial Sequence
  Cyclic GFR-binding peptide
  MOD_RES (21)..(22): Xaa is C or S
VVKENEDLYLMSIASLETPVXXAKPIK

SEQ ID NO: 11624 - protein, 17 aa, Artificial Sequence
  Cyclic GFR-binding peptide
LLVRGNDLYLMSIASTK

SEQ ID NO: 11625 - protein, 20 aa, Artificial Sequence
  Cyclic GFR-binding peptide
  MOD_RES (14)..(15): Xaa is C or S
FYLISIANMKEPVXXPEPIG

SEQ ID NO: 11626 - protein, 20 aa, Artificial Sequence
  Cyclic GFR-binding peptide
  MOD_RES (14)..(15): Xaa is C or S
FYLISIANLRAPVXXSAPAA

SEQ ID NO: 11627 - protein, 19 aa, Artificial Sequence
  Cyclic GFR-binding peptide
IIQQKDNLYLMSIASMKTP

SEQ ID NO: 11628 - protein, 27 aa, Artificial Sequence
  Cyclic GFR-binding peptide
  MOD_RES (21)..(22): Xaa is C or S
VVNNAADLYLISIASLRAPVXXSAPAA

SEQ ID NO: 11629 - protein, 15 aa, Artificial Sequence
  Cyclic GFR-binding peptide
  MOD_RES (14)..(15): Xaa is C or S
LYLMSIASLETPVXX

SEQ ID NO: 11630 - protein, 19 aa, Artificial Sequence
  Cyclic GFR-binding peptide
  MOD_RES (14)..(15): Xaa is C or S
FYLISIANLAQPVXXPAAS

SEQ ID NO: 11631 - protein, 19 aa, Artificial Sequence
  Cyclic GFR-binding peptide
VVKENEDLYLMSIASLETP

SEQ ID NO: 11632 - protein, 27 aa, Artificial Sequence
  Cyclic GFR-binding peptide
  MOD_RES (21)..(22): Xaa is C or S
VVNNASDLYLISIASLRTPVXXTPPTS

SEQ ID NO: 11633 - protein, 15 aa, Artificial Sequence
  Cyclic GFR-binding peptide
  MOD_RES (14)..(14): Xaa is C or S
FYLVSIANLKTPAXT

SEQ ID NO: 11634 - protein, 19 aa, Artificial Sequence
  Cyclic GFR-binding peptide
VKPKRGVLYLISIASLAQP

SEQ ID NO: 11635 - protein, 20 aa, Artificial Sequence
  Cyclic GFR-binding peptide
  MOD_RES (14)..(14): Xaa is C or S
FYLVSIANLKTPAXTPKTVH

SEQ ID NO: 11636 - protein, 27 aa, Artificial Sequence
  Cyclic GFR-binding peptide
  MOD_RES (21)..(22): Xaa is C or S
VKPTRGVLYLISIASLDQPVXXPSASA

SEQ ID NO: 11637 - protein, 16 aa, Artificial Sequence
  Cyclic GFR-binding peptide
VVKDYEDFYLMSIANL

SEQ ID NO: 11638 - protein, 18 aa, Artificial Sequence
  Cyclic GFR-binding peptide
  MOD_RES (14)..(15): Xaa is C or S
LYLISIASLRAPVXXSAP

SEQ ID NO: 11639 - protein, 19 aa, Artificial Sequence
  Cyclic GFR-binding peptide
TPVGMDDFYLVSIANLKTP

SEQ ID NO: 11640 - protein, 18 aa, Artificial Sequence
  Cyclic GFR-binding peptide
  MOD_RES (14)..(15): Xaa is C or S
LYLISIASMKEPVXXPEP

SEQ ID NO: 11641 - protein, 18 aa, Artificial Sequence
  Cyclic GFR-binding peptide
  MOD_RES (14)..(15): Xaa is C or S
LYLMSIASMKTPTXXPGA

SEQ ID NO: 11642 - protein, 16 aa, Artificial Sequence
  Cyclic GFR-binding peptide
  MOD_RES (14)..(15): Xaa is C or S
FYLVSIANLKTPAXXP

SEQ ID NO: 11643 - protein, 16 aa, Artificial Sequence
  Cyclic GFR-binding peptide
VKPKRGVLYLISIASL

SEQ ID NO: 11644 - protein, 16 aa, Artificial Sequence
  Cyclic GFR-binding peptide
VKPTRGVFYLISIANL

SEQ ID NO: 11645 - protein, 16 aa, Artificial Sequence
  Cyclic GFR-binding peptide
VVKDYEDLYLMSIASL

SEQ ID NO: 11646 - protein, 13 aa, Artificial Sequence
  Cyclic GFR-binding peptide
FYLVSIANLKTPV

SEQ ID NO: 11647 - protein, 17 aa, Artificial Sequence
  Cyclic GFR-binding peptide
VVKDYEDFYLMSIANLE

SEQ ID NO: 11648 - protein, 19 aa, Artificial Sequence
  Cyclic GFR-binding peptide
  MOD_RES (14)..(15): Xaa is C or S
FYLVSIANLKTPAXXAKPV

SEQ ID NO: 11649 - protein, 27 aa, Artificial Sequence
  Cyclic GFR-binding peptide
  MOD_RES (21)..(22): Xaa is C or S
IVNSSDDFYLVSIANLQTPAXXPKPVT

SEQ ID NO: 11650 - protein, 27 aa, Artificial Sequence
  Cyclic GFR-binding peptide
  MOD_RES (21)..(22): Xaa is C or S
LLVRGNDFYLMSIANTKVPAXXTSPVR

SEQ ID NO: 11651 - protein, 17 aa, Artificial Sequence
  Cyclic GFR-binding peptide
YTVVGKDLYLISIASLK

SEQ ID NO: 11652 - protein, 18 aa, Artificial Sequence
  Cyclic GFR-binding peptide
IVNSSDDLYLVSIASLKT

SEQ ID NO: 11653 - protein, 14 aa, Artificial Sequence
  Cyclic GFR-binding peptide
  MOD_RES (14)..(14): Xaa is C or S
LYLVSIASLKTPAX

SEQ ID NO: 11654 - protein, 19 aa, Artificial Sequence
  Cyclic GFR-binding peptide
  MOD_RES (14)..(15): Xaa is C or S
LYLVSIASLKTPAXXPKPV

SEQ ID NO: 11655 - protein, 19 aa, Artificial Sequence
  Cyclic GFR-binding peptide
  MOD_RES (14)..(15): Xaa is C or S
FYLMSIANLETPVXXAKPI

SEQ ID NO: 11656 - protein, 17 aa, Artificial Sequence
  Cyclic GFR-binding peptide
  MOD_RES (14)..(15): Xaa is C or S
LYLISIASLDQPVXXPS

SEQ ID NO: 11657 - protein, 17 aa, Artificial Sequence
  Cyclic GFR-binding peptide
VVKDYEDLYLMSIASLE

SEQ ID NO: 11658 - protein, 27 aa, Artificial Sequence
  Cyclic GFR-binding peptide
  MOD_RES (21)..(22): Xaa is C or S
IVNSSDDFYLVSIANLKTPAXXPKPVY

SEQ ID NO: 11659 - protein, 27 aa, Artificial Sequence
  Cyclic GFR-binding peptide
  MOD_RES (21)..(22): Xaa is C or S
IVNSSDDLYLVSIASLQTPAXXPKPVT

SEQ ID NO: 11660 - protein, 19 aa, Artificial Sequence
  Cyclic GFR-binding peptide
  MOD_RES (14)..(15): Xaa is C or S
FYLISIANLDQPVXXPSAS

SEQ ID NO: 11661 - protein, 27 aa, Artificial Sequence
  Cyclic GFR-binding peptide
  MOD_RES (21)..(22): Xaa is C or S
LLVRGNDLYLMSIASTKVPAXXTSPVR

SEQ ID NO: 11662 - protein, 20 aa, Artificial Sequence
  Cyclic GFR-binding peptide
  MOD_RES (14)..(15): Xaa is C or S
FYLMSIANLETPVXXAKPIS

SEQ ID NO: 11663 - protein, 19 aa, Artificial Sequence
  Cyclic GFR-binding peptide
  MOD_RES (14)..(15): Xaa is C or S
LYLVSIASLKTPVXXAKGV

SEQ ID NO: 11664 - protein, 17 aa, Artificial Sequence
  Cyclic GFR-binding peptide
YTVVGKDFYLISIANLK

SEQ ID NO: 11665 - protein, 18 aa, Artificial Sequence
  Cyclic GFR-binding peptide
IVNSSDDLYLVSIASLQT

SEQ ID NO: 11666 - protein, 20 aa, Artificial Sequence
  Cyclic GFR-binding peptide
  MOD_RES (14)..(15): Xaa is C or S
FYLVSIANLKTPAXXPKPVY

SEQ ID NO: 11667 - protein, 17 aa, Artificial Sequence
  Cyclic GFR-binding peptide
IVNNSSDLYLVSIASLK

SEQ ID NO: 11668 - protein, 16 aa, Artificial Sequence
  Cyclic GFR-binding peptide
  MOD_RES (14)..(15): Xaa is C or S
FYLMSIANLETPVXXA

SEQ ID NO: 11669 - protein, 19 aa, Artificial Sequence
  Cyclic GFR-binding peptide
TPVGMDDLYLVSIASLKTP

SEQ ID NO: 11670 - protein, 15 aa, Artificial Sequence
  Cyclic GFR-binding peptide
  MOD_RES (14)..(15): Xaa is C or S
LYLISIASLDQPVXX

SEQ ID NO: 11671 - protein, 27 aa, Artificial Sequence
  Cyclic GFR-binding peptide
  MOD_RES (21)..(22): Xaa is C or S
IVNSSDDLYLVSIASLKTPAXXPKPVY

SEQ ID NO: 11672 - protein, 17 aa, Artificial Sequence
  Cyclic GFR-binding peptide
  MOD_RES (14)..(15): Xaa is C or S
LYLVSIASLKTPVXXAK

SEQ ID NO: 11673 - protein, 20 aa, Artificial Sequence
  Cyclic GFR-binding peptide
  MOD_RES (14)..(15): Xaa is C or S
FYLISIANLKTPVXXAKSAK

SEQ ID NO: 11674 - protein, 20 aa, Artificial Sequence
  Cyclic GFR-binding peptide
  MOD_RES (14)..(15): Xaa is C or S
LYLVSIASLKTPAXXAKPVA

SEQ ID NO: 11675 - protein, 19 aa, Artificial Sequence
  Cyclic GFR-binding peptide
VVNNASDLYLISIASLRTP

SEQ ID NO: 11676 - protein, 20 aa, Artificial Sequence
  Cyclic GFR-binding peptide
  MOD_RES (14)..(15): Xaa is C or S
LYLVSIASLKTPAXXPKPVH

SEQ ID NO: 11677 - protein, 19 aa, Artificial Sequence
  Cyclic GFR-binding peptide
IVNSSDDLYLVSIASLQTP

SEQ ID NO: 11678 - protein, 18 aa, Artificial Sequence
  Cyclic GFR-binding peptide
VKPTRGVFYLISIANLDQ

SEQ ID NO: 11679 - protein, 18 aa, Artificial Sequence
  Cyclic GFR-binding peptide
VVNNAADLYLISIASLRA

SEQ ID NO: 11680 - protein, 13 aa, Artificial Sequence
  Cyclic GFR-binding peptide
LYLMSIASLETPV

SEQ ID NO: 11681 - protein, 16 aa, Artificial Sequence
  Cyclic GFR-binding peptide
IVNNSSDFYLVSIANL

SEQ ID NO: 11682 - protein, 16 aa, Artificial Sequence
  Cyclic GFR-binding peptide
  MOD_RES (14)..(15): Xaa is C or S
LYLISIASLKTPVXXA

SEQ ID NO: 11683 - protein, 16 aa, Artificial Sequence
  Cyclic GFR-binding peptide
  MOD_RES (14)..(15): Xaa is C or S
FYLVSIANLKTPAXXA

SEQ ID NO: 11684 - protein, 16 aa, Artificial Sequence
  Cyclic GFR-binding peptide
  MOD_RES (14)..(15): Xaa is C or S
FYLISIANLKTPVXXA

SEQ ID NO: 11685 - protein, 17 aa, Artificial Sequence
  Cyclic GFR-binding peptide
  MOD_RES (14)..(15): Xaa is C or S
LYLISIASLAQPVXXPA

SEQ ID NO: 11686 - protein, 19 aa, Artificial Sequence
  Cyclic GFR-binding peptide
LLVRGNDFYLMSIANTKVP

SEQ ID NO: 11687 - protein, 16 aa, Artificial Sequence
  Cyclic GFR-binding peptide
LLVRGNDLYLMSIAST

SEQ ID NO: 11688 - protein, 19 aa, Artificial Sequence
  Cyclic GFR-binding peptide
VKPTRGVFYLISIANLDQP

SEQ ID NO: 11689 - protein, 15 aa, Artificial Sequence
  Cyclic GFR-binding peptide
  MOD_RES (14)..(15): Xaa is C or S
LYLVSIASLKTPVXX

SEQ ID NO: 11690 - protein, 16 aa, Artificial Sequence
  Cyclic GFR-binding peptide
  MOD_RES (14)..(14): Xaa is C or S
LYLVSIASLKTPAXTP

SEQ ID NO: 11691 - protein, 15 aa, Artificial Sequence
  Cyclic GFR-binding peptide
IVNNSSDLYLVSIAS

SEQ ID NO: 11692 - protein, 14 aa, Artificial Sequence
  Cyclic GFR-binding peptide
  MOD_RES (14)..(14): Xaa is C or S
LYLISIASLDQSVX

SEQ ID NO: 11693 - protein, 15 aa, Artificial Sequence
  Cyclic GFR-binding peptide
  MOD_RES (14)..(15): Xaa is C or S
FYLVSIANLKTPVXX

SEQ ID NO: 11694 - protein, 16 aa, Artificial Sequence
  Cyclic GFR-binding peptide
  MOD_RES (14)..(14): Xaa is C or S
FYLVSIANLKTPAXTP

SEQ ID NO: 11695 - protein, 16 aa, Artificial Sequence
  Cyclic GFR-binding peptide
VKPTRGVLYLISIASL

SEQ ID NO: 11696 - protein, 17 aa, Artificial Sequence
  Cyclic GFR-binding peptide
  MOD_RES (14)..(15): Xaa is C or S
FYLISIANLRAPVXXSA

SEQ ID NO: 11697 - protein, 17 aa, Artificial Sequence
  Cyclic GFR-binding peptide
  MOD_RES (14)..(15): Xaa is C or S
LYLMSIASLETPVXXAK

SEQ ID NO: 11698 - protein, 16 aa, Artificial Sequence
  Cyclic GFR-binding peptide
  MOD_RES (14)..(15): Xaa is C or S
LYLISIASLDQPVXXP

SEQ ID NO: 11699 - protein, 20 aa, Artificial Sequence
  Cyclic GFR-binding peptide
  MOD_RES (14)..(15): Xaa is C or S
LYLVSIASLKTPVXXAKGVK

SEQ ID NO: 11700 - protein, 20 aa, Artificial Sequence
  Cyclic GFR-binding peptide
  MOD_RES (14)..(15): Xaa is C or S
LYLISIASLDQSVXXPSASA

SEQ ID NO: 11701 - protein, 13 aa, Artificial Sequence
  Cyclic GFR-binding peptide
FYLMSIANMKTPT

SEQ ID NO: 11702 - protein, 20 aa, Artificial Sequence
  Cyclic GFR-binding peptide
  MOD_RES (14)..(15): Xaa is C or S
FYLMSIANTKVPAXXTSPVR

SEQ ID NO: 11703 - protein, 19 aa, Artificial Sequence
  Cyclic GFR-binding peptide
  MOD_RES (14)..(15): Xaa is C or S
FYLVSIANLKTPAXXPKPV

SEQ ID NO: 11704 - protein, 19 aa, Artificial Sequence
  Cyclic GFR-binding peptide
  MOD_RES (14)..(15): Xaa is C or S
FYLISIANLKTPVXXAKSA

SEQ ID NO: 11705 - protein, 18 aa, Artificial Sequence
  Cyclic GFR-binding peptide
  MOD_RES (14)..(15): Xaa is C or S
FYLISIANLAQPVXXPAA

SEQ ID NO: 11706 - protein, 17 aa, Artificial Sequence
  Cyclic GFR-binding peptide
VKPKRGVLYLISIASLA

SEQ ID NO: 11707 - protein, 13 aa, Artificial Sequence
  Cyclic GFR-binding peptide
LYLMSIASMKTPT

SEQ ID NO: 11708 - protein, 16 aa, Artificial Sequence
  Cyclic GFR-binding peptide
VVNNAADLYLISIASL

SEQ ID NO: 11709 - protein, 15 aa, Artificial Sequence
  Cyclic GFR-binding peptide
  MOD_RES (14)..(15): Xaa is C or S
FYLISIANLDQSVXX

SEQ ID NO: 11710 - protein, 19 aa, Artificial Sequence
  Cyclic GFR-binding peptide
VKPKRGVFYLISIANLAQP

SEQ ID NO: 11711 - protein, 15 aa, Artificial Sequence
  Cyclic GFR-binding peptide
VKPTRGVLYLISIAS

SEQ ID NO: 11712 - protein, 14 aa, Artificial Sequence
  Cyclic GFR-binding peptide
  MOD_RES (14)..(14): Xaa is C or S
FYLISIANLRTPVX

SEQ ID NO: 11713 - protein, 17 aa, Artificial Sequence
  Cyclic GFR-binding peptide
  MOD_RES (14)..(14): Xaa is C or S
FYLVSIANLKTPAXTPK

SEQ ID NO: 11714 - protein, 14 aa, Artificial Sequence
  Cyclic GFR-binding peptide
  MOD_RES (14)..(14): Xaa is C or S
LYLISIASLRTPVX

SEQ ID NO: 11715 - protein, 27 aa, Artificial Sequence
  Cyclic GFR-binding peptide
  MOD_RES (21)..(22): Xaa is C or S
VVNNAADFYLISIANLRAPVXXSAPAA

SEQ ID NO: 11716 - protein, 13 aa, Artificial Sequence
  Cyclic GFR-binding peptide
LYLVSIASLKTPV

SEQ ID NO: 11717 - protein, 16 aa, Artificial Sequence
  Cyclic GFR-binding peptide
  MOD_RES (14)..(15): Xaa is C or S
LYLVSIASLKTPAXXP

SEQ ID NO: 11718 - protein, 15 aa, Artificial Sequence
  Cyclic GFR-binding peptide
VVKDYEDFYLMSIAN

SEQ ID NO: 11719 - protein, 15 aa, Artificial Sequence
  Cyclic GFR-binding peptide
VVKENEDLYLMSIAS

SEQ ID NO: 11720 - protein, 27 aa, Artificial Sequence
  Cyclic GFR-binding peptide
  MOD_RES (21)..(21): Xaa is C or S
IVNSSDDLYLVSIASLKTPAXTPKTVH

SEQ ID NO: 11721 - protein, 20 aa, Artificial Sequence
  Cyclic GFR-binding peptide
  MOD_RES (14)..(15): Xaa is C or S
FYLISIANLDQSVXXPSASA

SEQ ID NO: 11722 - protein, 19 aa, Artificial Sequence
  Cyclic GFR-binding peptide
  MOD_RES (14)..(15): Xaa is C or S
FYLMSIANTKVPAXXTSPV

SEQ ID NO: 11723 - protein, 18 aa, Artificial Sequence
  Cyclic GFR-binding peptide
TPVGMDDLYLVSIASLKT

SEQ ID NO: 11724 - protein, 15 aa, Artificial Sequence
  Cyclic GFR-binding peptide
  MOD_RES (14)..(15): Xaa is C or S
LYLMSIASMKTPTXX

SEQ ID NO: 11725 - protein, 13 aa, Artificial Sequence
  Cyclic GFR-binding peptide
FYLISIANLDQSV

SEQ ID NO: 11726 - protein, 14 aa, Artificial Sequence
  Cyclic GFR-binding peptide
  MOD_RES (14)..(14): Xaa is C or S
LYLVSIASLQTPAX

SEQ ID NO: 11727 - protein, 16 aa, Artificial Sequence
  Cyclic GFR-binding peptide
VVNKNEDLYLISIASM

SEQ ID NO: 11728 - protein, 15 aa, Artificial Sequence
  Cyclic GFR-binding peptide
YTVVGKDLYLISIAS

SEQ ID NO: 11729 - protein, 18 aa, Artificial Sequence
  Cyclic GFR-binding peptide
  MOD_RES (14)..(15): Xaa is C or S
FYLISIANLDQPVXXPSA

SEQ ID NO: 11730 - protein, 18 aa, Artificial Sequence
  Cyclic GFR-binding peptide
IIQQKDNFYLMSIANMKT

SEQ ID NO: 11731 - protein, 19 aa, Artificial Sequence
  Cyclic GFR-binding peptide
IVNSSDDLYLVSIASLKTP

SEQ ID NO: 11732 - protein, 16 aa, Artificial Sequence
  Cyclic GFR-binding peptide
  MOD_RES (14)..(15): Xaa is C or S
FYLISIANLDQPVXXP

SEQ ID NO: 11733 - protein, 18 aa, Artificial Sequence
  Cyclic GFR-binding peptide
  MOD_RES (14)..(15): Xaa is C or S
FYLISIANLRTPVXXTPP

SEQ ID NO: 11734 - protein, 16 aa, Artificial Sequence
  Cyclic GFR-binding peptide
  MOD_RES (14)..(15): Xaa is C or S
FYLMSIANMKTPTXXP

SEQ ID NO: 11735 - protein, 19 aa, Artificial Sequence
  Cyclic GFR-binding peptide
IKPTKGILYLISIASLDQS

SEQ ID NO: 11736 - protein, 19 aa, Artificial Sequence
  Cyclic GFR-binding peptide
  MOD_RES (14)..(15): Xaa is C or S
FYLISIANMKEPVXXPEPI

SEQ ID NO: 11737 - protein, 20 aa, Artificial Sequence
  Cyclic GFR-binding peptide
  MOD_RES (14)..(15): Xaa is C or S
LYLISIASMKEPVXXPEPIG

SEQ ID NO: 11738 - protein, 15 aa, Artificial Sequence
  Cyclic GFR-binding peptide
TPVGMDDFYLVSIAN

SEQ ID NO: 11739 - protein, 20 aa, Artificial Sequence
  Cyclic GFR-binding peptide
  MOD_RES (14)..(15): Xaa is C or S
LYLISIASLRAPVXXSAPAA

SEQ ID NO: 11740 - protein, 27 aa, Artificial Sequence
  Cyclic GFR-binding peptide
  MOD_RES (21)..(22): Xaa is C or S
VVNKNEDFYLISIANMKEPVXXPEPIG

SEQ ID NO: 11741 - protein, 18 aa, Artificial Sequence
  Cyclic GFR-binding peptide
VVKENEDFYLMSIANLET

SEQ ID NO: 11742 - protein, 27 aa, Artificial Sequence
  Cyclic GFR-binding peptide
  MOD_RES (21)..(22): Xaa is C or S
VVKDYEDLYLMSIASLETPVXXAKPIS

SEQ ID NO: 11743 - protein, 19 aa, Artificial Sequence
  Cyclic GFR-binding peptide
  MOD_RES (14)..(15): Xaa is C or S
FYLISIANLDQSVXXPSAS

SEQ ID NO: 11744 - protein, 19 aa, Artificial Sequence
  Cyclic GFR-binding peptide
IKPTKGIFYLISIANLDQS

SEQ ID NO: 11745 - protein, 17 aa, Artificial Sequence
  Cyclic GFR-binding peptide
VVNNASDLYLISIASLR

SEQ ID NO: 11746 - protein, 18 aa, Artificial Sequence
  Cyclic GFR-binding peptide
VVKENEDLYLMSIASLET

SEQ ID NO: 11747 - protein, 19 aa, Artificial Sequence
  Cyclic GFR-binding peptide
VVNKNEDFYLISIANMKEP

SEQ ID NO: 11748 - protein, 18 aa, Artificial Sequence
  Cyclic GFR-binding peptide
VKPKRGVFYLISIANLAQ

SEQ ID NO: 11749 - protein, 16 aa, Artificial Sequence
  Cyclic GFR-binding peptide
IKPTKGIFYLISIANL

SEQ ID NO: 11750 - protein, 27 aa, Artificial Sequence
  Cyclic GFR-binding peptide
  MOD_RES (21)..(22): Xaa is C or S
YTVVGKDLYLISIASLKTPVXXAKSAK

SEQ ID NO: 11751 - protein, 19 aa, Artificial Sequence
  Cyclic GFR-binding peptide
VVNKNEDLYLISIASMKEP

SEQ ID NO: 11752 - protein, 20 aa, Artificial Sequence
  Cyclic GFR-binding peptide
  MOD_RES (14)..(15): Xaa is C or S
LYLVSIASLKTPAXXPKPVY

SEQ ID NO: 11753 - protein, 16 aa, Artificial Sequence
  Cyclic GFR-binding peptide
  MOD_RES (14)..(15): Xaa is C or S
FYLISIANLAQPVXXP

SEQ ID NO: 11754 - protein, 20 aa, Artificial Sequence
  Cyclic GFR-binding peptide
  MOD_RES (14)..(15): Xaa is C or S
LYLMSIASLETPVXXAKPIS

SEQ ID NO: 11755 - protein, 18 aa, Artificial Sequence
  Cyclic GFR-binding peptide
VKPKRGVLYLISIASLAQ

SEQ ID NO: 11756 - protein, 14 aa, Artificial Sequence
  Cyclic GFR-binding peptide
  MOD_RES (14)..(14): Xaa is C or S
FYLISIANMKEPVX

SEQ ID NO: 11757 - protein, 17 aa, Artificial Sequence
  Cyclic GFR-binding peptide
  MOD_RES (14)..(15): Xaa is C or S
LYLISIASLRTPVXXTP

SEQ ID NO: 11758 - protein, 19 aa, Artificial Sequence
  Cyclic GFR-binding peptide
  MOD_RES (14)..(15): Xaa is C or S
FYLISIANLRTPVXXTPPT

SEQ ID NO: 11759 - protein, 15 aa, Artificial Sequence
  Cyclic GFR-binding peptide
  MOD_RES (14)..(15): Xaa is C or S
LYLISIASLDQSVXX

SEQ ID NO: 11760 - protein, 20 aa, Artificial Sequence
  Cyclic GFR-binding peptide
  MOD_RES (14)..(15): Xaa is C or S
FYLVSIANLKTPVXXAKGVK

SEQ ID NO: 11761 - protein, 17 aa, Artificial Sequence
  Cyclic GFR-binding peptide
  MOD_RES (14)..(15): Xaa is C or S
FYLMSIANMKTPTXXPG

SEQ ID NO: 11762 - protein, 20 aa, Artificial Sequence
  Cyclic GFR-binding peptide
  MOD_RES (14)..(15): Xaa is C or S
FYLISIANLRTPVXXTPPTS

SEQ ID NO: 11763 - protein, 27 aa, Artificial Sequence
  Cyclic GFR-binding peptide
  MOD_RES (21)..(22): Xaa is C or S
YTVVGKDFYLISIANLKTPVXXAKSAK

SEQ ID NO: 11764 - protein, 19 aa, Artificial Sequence
  Cyclic GFR-binding peptide
  MOD_RES (14)..(15): Xaa is C or S
LYLMSIASLETPVXXAKPI

SEQ ID NO: 11765 - protein, 17 aa, Artificial Sequence
  Cyclic GFR-binding peptide
  MOD_RES (14)..(15): Xaa is C or S
LYLISIASLRAPVXXSA

SEQ ID NO: 11766 - protein, 13 aa, Artificial Sequence
  Cyclic GFR-binding peptide
FYLISIANLRTPV

SEQ ID NO: 11767 - protein, 19 aa, Artificial Sequence
  Cyclic GFR-binding peptide
  MOD_RES (14)..(15): Xaa is C or S
LYLISIASLAQPVXXPAAS

SEQ ID NO: 11768 - protein, 15 aa, Artificial Sequence
  Cyclic GFR-binding peptide
  MOD_RES (14)..(15): Xaa is C or S
FYLMSIANLETPVXX

SEQ ID NO: 11769 - protein, 16 aa, Artificial Sequence
  Cyclic GFR-binding peptide
YTVVGKDFYLISIANL

SEQ ID NO: 11770 - protein, 20 aa, Artificial Sequence
  Cyclic GFR-binding peptide
  MOD_RES (14)..(15): Xaa is C or S
LYLISIASLDQPVXXPSASA

SEQ ID NO: 11771 - protein, 19 aa, Artificial Sequence
  Cyclic GFR-binding peptide
  MOD_RES (14)..(15): Xaa is C or S
LYLISIASLKTPVXXAKSA

SEQ ID NO: 11772 - protein, 16 aa, Artificial Sequence
  Cyclic GFR-binding peptide
YTVVGKDLYLISIASL

SEQ ID NO: 11773 - protein, 14 aa, Artificial Sequence
  Cyclic GFR-binding peptide
  MOD_RES (14)..(14): Xaa is C or S
LYLISIASLRAPVX

SEQ ID NO: 11774 - protein, 15 aa, Artificial Sequence
  Cyclic GFR-binding peptide
  MOD_RES (14)..(14): Xaa is C or S
LYLVSIASLKTPAXT

SEQ ID NO: 11775 - protein, 19 aa, Artificial Sequence
  Cyclic GFR-binding peptide
  MOD_RES (14)..(15): Xaa is C or S
LYLMSIASMKTPTXXPGAS

SEQ ID NO: 11776 - protein, 18 aa, Artificial Sequence
  Cyclic GFR-binding peptide
IVNSSDDFYLVSIANLQT

SEQ ID NO: 11777 - protein, 16 aa, Artificial Sequence
  Cyclic GFR-binding peptide
VVNKNEDFYLISIANM

SEQ ID NO: 11778 - protein, 15 aa, Artificial Sequence
  Cyclic GFR-binding peptide
  MOD_RES (14)..(15): Xaa is C or S
LYLISIASLRTPVXX

SEQ ID NO: 11779 - protein, 13 aa, Artificial Sequence
  Cyclic GFR-binding peptide
FYLMSIANLETPV

SEQ ID NO: 11780 - protein, 19 aa, Artificial Sequence
  Cyclic GFR-binding peptide
  MOD_RES (14)..(15): Xaa is C or S
FYLMSIANMKTPTXXPGAS

SEQ ID NO: 11781 - protein, 18 aa, Artificial Sequence
  Cyclic GFR-binding peptide
VKPTRGVLYLISIASLDQ

SEQ ID NO: 11782 - protein, 18 aa, Artificial Sequence
  Cyclic GFR-binding peptide
VVNNAADFYLISIANLRA

SEQ ID NO: 11783 - protein, 18 aa, Artificial Sequence
  Cyclic GFR-binding peptide
IVNSSDDFYLVSIANLKT

SEQ ID NO: 11784 - protein, 18 aa, Artificial Sequence
  Cyclic GFR-binding peptide
  MOD_RES (14)..(15): Xaa is C or S
FYLISIANLKTPVXXAKS

SEQ ID NO: 11785 - protein, 16 aa, Artificial Sequence
  Cyclic GFR-binding peptide
IVNNSSDLYLVSIASL

SEQ ID NO: 11786 - protein, 15 aa, Artificial Sequence
  Cyclic GFR-binding peptide
VKPKRGVLYLISIAS

SEQ ID NO: 11787 - protein, 19 aa, Artificial Sequence
  Cyclic GFR-binding peptide
LLVRGNDLYLMSIASTKVP

SEQ ID NO: 11788 - protein, 15 aa, Artificial Sequence
  Cyclic GFR-binding peptide
  MOD_RES (14)..(15): Xaa is C or S
FYLISIANLRTPVXX

SEQ ID NO: 11789 - protein, 16 aa, Artificial Sequence
  Cyclic GFR-binding peptide
  MOD_RES (14)..(15): Xaa is C or S
FYLISIANLDQSVXXP

SEQ ID NO: 11790 - protein, 16 aa, Artificial Sequence
  Cyclic GFR-binding peptide
VKPKRGVFYLISIANL

SEQ ID NO: 11791 - protein, 14 aa, Artificial Sequence
  Cyclic GFR-binding peptide
  MOD_RES (14)..(14): Xaa is C or S
FYLISIANLRAPVX

SEQ ID NO: 11792 - protein, 14 aa, Artificial Sequence
  Cyclic GFR-binding peptide
  MOD_RES (14)..(14): Xaa is C or S
FYLMSIANLETPVX

SEQ ID NO: 11793 - protein, 17 aa, Artificial Sequence
  Cyclic GFR-binding peptide
  MOD_RES (14)..(15): Xaa is C or S
LYLISIASLDQSVXXPS

SEQ ID NO: 11794 - protein, 20 aa, Artificial Sequence
  Cyclic GFR-binding peptide
  MOD_RES (14)..(15): Xaa is C or S
FYLISIANLDQPVXXPSASA

SEQ ID NO: 11795 - protein, 15 aa, Artificial Sequence
  Cyclic GFR-binding peptide
VVNKNEDLYLISIAS

SEQ ID NO: 11796 - protein, 15 aa, Artificial Sequence
  Cyclic GFR-binding peptide
VVKDYEDLYLMSIAS

SEQ ID NO: 11797 - protein, 14 aa, Artificial Sequence
  Cyclic GFR-binding peptide
  MOD_RES (14)..(14): Xaa is C or S
FYLVSIANLKTPVX

SEQ ID NO: 11798 - protein, 19 aa, Artificial Sequence
  Cyclic GFR-binding peptide
YTVVGKDLYLISIASLKTP

SEQ ID NO: 11799 - protein, 16 aa, Artificial Sequence
  Cyclic GFR-binding peptide
VVNNASDFYLISIANL

SEQ ID NO: 11800 - protein, 13 aa, Artificial Sequence
  Cyclic GFR-binding peptide
LYLMSIASTKVPA

SEQ ID NO: 11801 - protein, 14 aa, Artificial Sequence
  Cyclic GFR-binding peptide
  MOD_RES (14)..(14): Xaa is C or S
LYLVSIASLKTPVX

SEQ ID NO: 11802 - protein, 15 aa, Artificial Sequence
  Cyclic GFR-binding peptide
VVKENEDFYLMSIAN

SEQ ID NO: 11803 - protein, 18 aa, Artificial Sequence
  Cyclic GFR-binding peptide
IKPTKGIFYLISIANLDQ

SEQ ID NO: 11804 - protein, 13 aa, Artificial Sequence
  Cyclic GFR-binding peptide
FYLMSIANTKVPA

SEQ ID NO: 11805 - protein, 18 aa, Artificial Sequence
  Cyclic GFR-binding peptide
TPVGMDDFYLVSIANLKT

SEQ ID NO: 11806 - protein, 17 aa, Artificial Sequence
  Cyclic GFR-binding peptide
  MOD_RES (14)..(15): Xaa is C or S
FYLISIANLRTPVXXTP

SEQ ID NO: 11807 - protein, 16 aa, Artificial Sequence
  Cyclic GFR-binding peptide
  MOD_RES (14)..(15): Xaa is C or S
LYLISIASLDQSVXXP

SEQ ID NO: 11808 - protein, 15 aa, Artificial Sequence
  Cyclic GFR-binding peptide
  MOD_RES (14)..(15): Xaa is C or S
LYLMSIASTKVPAXX

SEQ ID NO: 11809 - protein, 19 aa, Artificial Sequence
  Cyclic GFR-binding peptide
IVNNSSDLYLVSIASLKTP

SEQ ID NO: 11810 - protein, 18 aa, Artificial Sequence
  Cyclic GFR-binding peptide
  MOD_RES (14)..(15): Xaa is C or S
LYLISIASLKTPVXXAKS

SEQ ID NO: 11811 - protein, 27 aa, Artificial Sequence
  Cyclic GFR-binding peptide
  MOD_RES (21)..(22): Xaa is C or S
IIQQKDNFYLMSIANMKTPTXXPGASG

SEQ ID NO: 11812 - protein, 17 aa, Artificial Sequence
  Cyclic GFR-binding peptide
IIQQKDNLYLMSIASMK

SEQ ID NO: 11813 - protein, 17 aa, Artificial Sequence
  Cyclic GFR-binding peptide
VVNKNEDFYLISIANMK

SEQ ID NO: 11814 - protein, 18 aa, Artificial Sequence
  Cyclic GFR-binding peptide
  MOD_RES (14)..(15): Xaa is C or S
LYLISIASLRTPVXXTPP

SEQ ID NO: 11815 - protein, 17 aa, Artificial Sequence
  Cyclic GFR-binding peptide
  MOD_RES (14)..(15): Xaa is C or S
FYLISIANLDQSVXXPS

SEQ ID NO: 11816 - protein, 14 aa, Artificial Sequence
  Cyclic GFR-binding peptide
  MOD_RES (14)..(14): Xaa is C or S
LYLMSIASLETPVX

SEQ ID NO: 11817 - protein, 19 aa, Artificial Sequence
  Cyclic GFR-binding peptide
VVKDYEDFYLMSIANLETP

SEQ ID NO: 11818 - protein, 15 aa, Artificial Sequence
  Cyclic GFR-binding peptide
NAISILYFIGKTPKI

SEQ ID NO: 11819 - protein, 13 aa, Artificial Sequence
  Cyclic GFR-binding peptide
APTQLSAISVLYL

SEQ ID NO: 11820 - protein, 16 aa, Artificial Sequence
  Cyclic GFR-binding peptide
MSAISMLYLNDKQQII

SEQ ID NO: 11821 - protein, 27 aa, Artificial Sequence
  Cyclic GFR-binding peptide
  MOD_RES (6)..(7): Xaa is C or S
KVGKAXXVPTKLNAISVLYFDDMGVPT

SEQ ID NO: 11822 - protein, 14 aa, Artificial Sequence
  Cyclic GFR-binding peptide
  MOD_RES (1)..(1): Xaa is C or S
XVPTKLNAISILYF

SEQ ID NO: 11823 - protein, 27 aa, Artificial Sequence
  Cyclic GFR-binding peptide
  MOD_RES (6)..(7): Xaa is C or S
KVGKAXXVPTKLSAISVLYLDDMGVPT

SEQ ID NO: 11824 - protein, 17 aa, Artificial Sequence
  Cyclic GFR-binding peptide
KLSAISVLYLDDSSNVI

SEQ ID NO: 11825 - protein, 16 aa, Artificial Sequence
  Cyclic GFR-binding peptide
MNAISMLYFNDKQQII

SEQ ID NO: 11826 - protein, 19 aa, Artificial Sequence
  Cyclic GFR-binding peptide
  MOD_RES (5)..(6): Xaa is C or S
SASPXXVSQDLSAISILYL

SEQ ID NO: 11827 - protein, 15 aa, Artificial Sequence
  Cyclic GFR-binding peptide
  MOD_RES (1)..(2): Xaa is C or S
XXAPVKTNAISMLYF

SEQ ID NO: 11828 - protein, 15 aa, Artificial Sequence
  Cyclic GFR-binding peptide
  MOD_RES (1)..(2): Xaa is C or S
XXVPARLSAISILYL

SEQ ID NO: 11829 - protein, 13 aa, Artificial Sequence
  Cyclic GFR-binding peptide
VPTRLSAISILYL

SEQ ID NO: 11830 - protein, 13 aa, Artificial Sequence
  Cyclic GFR-binding peptide
VPQALSAISILYL

SEQ ID NO: 11831 - protein, 16 aa, Artificial Sequence
  Cyclic GFR-binding peptide
LNAISVLYFDDMGVPT

SEQ ID NO: 11832 - protein, 15 aa, Artificial Sequence
  Cyclic GFR-binding peptide
SAISILYLIGKTPKI

SEQ ID NO: 11833 - protein, 19 aa, Artificial Sequence
  Cyclic GFR-binding peptide
  MOD_RES (5)..(6): Xaa is C or S
IPEPXXVPEKMSAISILYL

SEQ ID NO: 11834 - protein, 14 aa, Artificial Sequence
  Cyclic GFR-binding peptide
  MOD_RES (1)..(1): Xaa is C or S
XVPEKMSAISILYL

SEQ ID NO: 11835 - protein, 18 aa, Artificial Sequence
  Cyclic GFR-binding peptide
TKLNAISILYFDKGVVTY

SEQ ID NO: 11836 - protein, 20 aa, Artificial Sequence
  Cyclic GFR-binding peptide
  MOD_RES (6)..(7): Xaa is C or S
STPPTXXVPTRLSAISILYL

SEQ ID NO: 11837 - protein, 14 aa, Artificial Sequence
  Cyclic GFR-binding peptide
  MOD_RES (1)..(1): Xaa is C or S
XAPVKTSAISMLYL

SEQ ID NO: 11838 - protein, 18 aa, Artificial Sequence
  Cyclic GFR-binding peptide
  MOD_RES (4)..(5): Xaa is C or S
PKAXXAPTKLNAISVLYF

SEQ ID NO: 11839 - protein, 18 aa, Artificial Sequence
  Cyclic GFR-binding peptide
TKLSAISILYLDKGVVTY

SEQ ID NO: 11840 - protein, 27 aa, Artificial Sequence
  Cyclic GFR-binding peptide
  MOD_RES (6)..(7): Xaa is C or S
HVPKPXXAPTKLSAISVLYLDDSSNVI

SEQ ID NO: 11841 - protein, 17 aa, Artificial Sequence
  Cyclic GFR-binding peptide
QLSAISVLYLDDSSNVI

SEQ ID NO: 11842 - protein, 15 aa, Artificial Sequence
  Cyclic GFR-binding peptide
NAISILYFDSANNVV

SEQ ID NO: 11843 - protein, 19 aa, Artificial Sequence
  Cyclic GFR-binding peptide
  MOD_RES (5)..(6): Xaa is C or S
TPPTXXVPTRLSAISILYL

SEQ ID NO: 11844 - protein, 16 aa, Artificial Sequence
  Cyclic GFR-binding peptide
  MOD_RES (2)..(3): Xaa is C or S
SXXVPARLNAISILYF

SEQ ID NO: 11845 - protein, 15 aa, Artificial Sequence
  Cyclic GFR-binding peptide
SAISILYLDAANNVV

SEQ ID NO: 11846 - protein, 18 aa, Artificial Sequence
  Cyclic GFR-binding peptide
TKLNAISVLYFDSSNNVI

SEQ ID NO: 11847 - protein, 16 aa, Artificial Sequence
  Cyclic GFR-binding peptide
LNAISMLYFDENEKVV

SEQ ID NO: 11848 - protein, 15 aa, Artificial Sequence
  Cyclic GFR-binding peptide
SAISILYLDSANNVV

SEQ ID NO: 11849 - protein, 20 aa, Artificial Sequence
  Cyclic GFR-binding peptide
  MOD_RES (6)..(7): Xaa is C or S
RVPSTXXAPVKTSAISMLYL

SEQ ID NO: 11850 - protein, 16 aa, Artificial Sequence
  Cyclic GFR-binding peptide
  MOD_RES (2)..(3): Xaa is C or S
PXXVPQALSAISILYL

SEQ ID NO: 11851 - protein, 19 aa, Artificial Sequence
  Cyclic GFR-binding peptide
  MOD_RES (5)..(6): Xaa is C or S
APASXXVPARLNAISILYF

SEQ ID NO: 11852 - protein, 16 aa, Artificial Sequence
  Cyclic GFR-binding peptide
  MOD_RES (2)..(3): Xaa is C or S
PXXAPTQLSAISVLYL

SEQ ID NO: 11853 - protein, 15 aa, Artificial Sequence
  Cyclic GFR-binding peptide
NAISILYFDAANNVV

SEQ ID NO: 11854 - protein, 18 aa, Artificial Sequence
  Cyclic GFR-binding peptide
TKLSAISVLYLDSSNNVI

SEQ ID NO: 11855 - protein, 13 aa, Artificial Sequence
  Cyclic GFR-binding peptide
VPARLSAISILYL

SEQ ID NO: 11856 - protein, 15 aa, Artificial Sequence
  Cyclic GFR-binding peptide
  MOD_RES (1)..(2): Xaa is C or S
XXVPEKMNAISILYF

SEQ ID NO: 11857 - protein, 20 aa, Artificial Sequence
  Cyclic GFR-binding peptide
  MOD_RES (6)..(7): Xaa is C or S
GSAGPXXTPTKMSAISMLYL

SEQ ID NO: 11858 - protein, 13 aa, Artificial Sequence
  Cyclic GFR-binding peptide
VPARLNAISILYF

SEQ ID NO: 11859 - protein, 15 aa, Artificial Sequence
  Cyclic GFR-binding peptide
NAISILYFVGRKPKV

SEQ ID NO: 11860 - protein, 18 aa, Artificial Sequence
  Cyclic GFR-binding peptide
TRLNAISILYFDSANNVV

SEQ ID NO: 11861 - protein, 16 aa, Artificial Sequence
  Cyclic GFR-binding peptide
LSAISVLYLDDSSNVI

SEQ ID NO: 11862 - protein, 20 aa, Artificial Sequence
  Cyclic GFR-binding peptide
  MOD_RES (6)..(7): Xaa is C or S
GSAGPXXTPTKMNAISMLYF

SEQ ID NO: 11863 - protein, 15 aa, Artificial Sequence
  Cyclic GFR-binding peptide
  MOD_RES (1)..(2): Xaa is C or S
XXVPEKMSAISILYL

SEQ ID NO: 11864 - protein, 19 aa, Artificial Sequence
  Cyclic GFR-binding peptide
PARLNAISILYFDAANNVV

SEQ ID NO: 11865 - protein, 13 aa, Artificial Sequence
  Cyclic GFR-binding peptide
VSQDLSAISILYL

SEQ ID NO: 11866 - protein, 19 aa, Artificial Sequence
  Cyclic GFR-binding peptide
  MOD_RES (5)..(6): Xaa is C or S
APASXXVPARLSAISILYL

SEQ ID NO: 11867 - protein, 17 aa, Artificial Sequence
  Cyclic GFR-binding peptide
  MOD_RES (3)..(4): Xaa is C or S
SPXXVPQDLNAISILYF

SEQ ID NO: 11868 - protein, 20 aa, Artificial Sequence
  Cyclic GFR-binding peptide
  MOD_RES (6)..(7): Xaa is C or S
AVPKAXXAPTKLNAISVLYF

SEQ ID NO: 11869 - protein, 16 aa, Artificial Sequence
  Cyclic GFR-binding peptide
  MOD_RES (2)..(3): Xaa is C or S
AXXAPTKLSAISVLYL

SEQ ID NO: 11870 - protein, 18 aa, Artificial Sequence
  Cyclic GFR-binding peptide
  MOD_RES (4)..(5): Xaa is C or S
ASPXXVPQDLSAISILYL

SEQ ID NO: 11871 - protein, 19 aa, Artificial Sequence
  Cyclic GFR-binding peptide
  MOD_RES (5)..(6): Xaa is C or S
VPSTXXAPVKTSAISMLYL

SEQ ID NO: 11872 - protein, 15 aa, Artificial Sequence
  Cyclic GFR-binding peptide
  MOD_RES (1)..(2): Xaa is C or S
XXVPQALSAISILYL

SEQ ID NO: 11873 - protein, 18 aa, Artificial Sequence
  Cyclic GFR-binding peptide
  MOD_RES (4)..(5): Xaa is C or S
GKAXXVPTKLSAISVLYL

SEQ ID NO: 11874 - protein, 17 aa, Artificial Sequence
  Cyclic GFR-binding peptide
RLNAISILYFDAANNVV

SEQ ID NO: 11875 - protein, 18 aa, Artificial Sequence
  Cyclic GFR-binding peptide
  MOD_RES (4)..(5): Xaa is C or S
PASXXVPARLNAISILYF

SEQ ID NO: 11876 - protein, 17 aa, Artificial Sequence
  Cyclic GFR-binding peptide
  MOD_RES (3)..(4): Xaa is C or S
GPXXTPTKMSAISMLYL

SEQ ID NO: 11877 - protein, 27 aa, Artificial Sequence
  Cyclic GFR-binding peptide
  MOD_RES (6)..(7): Xaa is C or S
ASAAPXXVPQALSAISILYLVGRKPKV

SEQ ID NO: 11878 - protein, 14 aa, Artificial Sequence
  Cyclic GFR-binding peptide
  MOD_RES (1)..(1): Xaa is C or S
XAPVKTNAISMLYF

SEQ ID NO: 11879 - protein, 18 aa, Artificial Sequence
  Cyclic GFR-binding peptide
  MOD_RES (4)..(5): Xaa is C or S
PKAXXVPTELNAISMLYF

SEQ ID NO: 11880 - protein, 17 aa, Artificial Sequence
  Cyclic GFR-binding peptide
KLSAISVLYLDDMGVPT

SEQ ID NO: 11881 - protein, 19 aa, Artificial Sequence
  Cyclic GFR-binding peptide
PTKLNAISILYFDKGVVTY

SEQ ID NO: 11882 - protein, 13 aa, Artificial Sequence
  Cyclic GFR-binding peptide
VPEKMSAISILYL

SEQ ID NO: 11883 - protein, 18 aa, Artificial Sequence
  Cyclic GFR-binding peptide
QDLSAISILYLIGKTPKI

SEQ ID NO: 11884 - protein, 16 aa, Artificial Sequence
  Cyclic GFR-binding peptide
LSAISVLYLDDMGVPT

SEQ ID NO: 11885 - protein, 27 aa, Artificial Sequence
  Cyclic GFR-binding peptide
  MOD_RES (6)..(7): Xaa is C or S
GIPEPXXVPEKMSAISILYLDENKNVV

SEQ ID NO: 11886 - protein, 17 aa, Artificial Sequence
  Cyclic GFR-binding peptide
KMNAISMLYFNDKQQII

SEQ ID NO: 11887 - protein, 27 aa, Artificial Sequence
  Cyclic GFR-binding peptide
  MOD_RES (6)..(7): Xaa is C or S
AVPKAXXAPTKLNAISVLYFDSSNNVI

SEQ ID NO: 11888 - protein, 13 aa, Artificial Sequence
  Cyclic GFR-binding peptide
VPEKMNAISILYF

SEQ ID NO: 11889 - protein, 18 aa, Artificial Sequence
  Cyclic GFR-binding peptide
  MOD_RES (4)..(5): Xaa is C or S
GKAXXVPTKLNAISVLYF

SEQ ID NO: 11890 - protein, 27 aa, Artificial Sequence
  Cyclic GFR-binding peptide
  MOD_RES (6)..(7): Xaa is C or S
ASASPXXVSQDLSAISILYLIGKTPKI

SEQ ID NO: 11891 - protein, 15 aa, Artificial Sequence
  Cyclic GFR-binding peptide
  MOD_RES (1)..(2): Xaa is C or S
XXVPARLNAISILYF

SEQ ID NO: 11892 - protein, 17 aa, Artificial Sequence
  Cyclic GFR-binding peptide
DLNAISILYFVGRTPKV

SEQ ID NO: 11893 - protein, 17 aa, Artificial Sequence
  Cyclic GFR-binding peptide
  MOD_RES (3)..(4): Xaa is C or S
KAXXVPTELNAISMLYF

SEQ ID NO: 11894 - protein, 15 aa, Artificial Sequence
  Cyclic GFR-binding peptide
SAISMLYLNDKQQII

SEQ ID NO: 11895 - protein, 14 aa, Artificial Sequence
  Cyclic GFR-binding peptide
  MOD_RES (1)..(1): Xaa is C or S
XVPTKLSAISILYL

SEQ ID NO: 11896 - protein, 17 aa, Artificial Sequence
  Cyclic GFR-binding peptide
  MOD_RES (3)..(4): Xaa is C or S
APXXVPQALNAISILYF

SEQ ID NO: 11897 - protein, 15 aa, Artificial Sequence
  Cyclic GFR-binding peptide
NAISILYFDENKNVV

SEQ ID NO: 11898 - protein, 20 aa, Artificial Sequence
  Cyclic GFR-binding peptide
  MOD_RES (6)..(7): Xaa is C or S
TVPKPXXAPTQLSAISVLYL

SEQ ID NO: 11899 - protein, 18 aa, Artificial Sequence
  Cyclic GFR-binding peptide
  MOD_RES (4)..(5): Xaa is C or S
AAPXXVPQALSAISILYL

SEQ ID NO: 11900 - protein, 19 aa, Artificial Sequence
  Cyclic GFR-binding peptide
  MOD_RES (5)..(6): Xaa is C or S
VPKPXXAPTQLSAISVLYL

SEQ ID NO: 11901 - protein, 16 aa, Artificial Sequence
  Cyclic GFR-binding peptide
LSAISILYLDSANNVV

SEQ ID NO: 11902 - protein, 27 aa, Artificial Sequence
  Cyclic GFR-binding peptide
  MOD_RES (6)..(7): Xaa is C or S
GSAGPXXTPTKMSAISMLYLNDKQQII

SEQ ID NO: 11903 - protein, 15 aa, Artificial Sequence
  Cyclic GFR-binding peptide
NAISMLYFDNGRVLL

SEQ ID NO: 11904 - protein, 19 aa, Artificial Sequence
  Cyclic GFR-binding peptide
PTKLNAISVLYFDSSNNVI

SEQ ID NO: 11905 - protein, 14 aa, Artificial Sequence
  Cyclic GFR-binding peptide
  MOD_RES (1)..(1): Xaa is C or S
XVPQALSAISILYL

SEQ ID NO: 11906 - protein, 20 aa, Artificial Sequence
  Cyclic GFR-binding peptide
  MOD_RES (7)..(7): Xaa is C or S
HVTKPTXAPTKLSAISVLYL

SEQ ID NO: 11907 - protein, 17 aa, Artificial Sequence
  Cyclic GFR-binding peptide
KMSAISILYLDENKNVV

SEQ ID NO: 11908 - protein, 13 aa, Artificial Sequence
  Cyclic GFR-binding peptide
APTKLSAISVLYL

SEQ ID NO: 11909 - protein, 27 aa, Artificial Sequence
  Cyclic GFR-binding peptide
  MOD_RES (6)..(7): Xaa is C or S
AVPKAXXAPTKLSAISVLYLDSSNNVI

SEQ ID NO: 11910 - protein, 17 aa, Artificial Sequence
  Cyclic GFR-binding peptide
  MOD_RES (3)..(4): Xaa is C or S
KAXXAPTKLNAISVLYF

SEQ ID NO: 11911 - protein, 19 aa, Artificial Sequence
  Cyclic GFR-binding peptide
  MOD_RES (5)..(6): Xaa is C or S
VPKAXXAPTKLSAISVLYL

SEQ ID NO: 11912 - protein, 15 aa, Artificial Sequence
  Cyclic GFR-binding peptide
SAISVLYLDDMGVPT

SEQ ID NO: 11913 - protein, 16 aa, Artificial Sequence
  Cyclic GFR-binding peptide
  MOD_RES (2)..(3): Xaa is C or S
SXXVPARLSAISILYL

SEQ ID NO: 11914 - protein, 17 aa, Artificial Sequence
  Cyclic GFR-binding peptide
  MOD_RES (3)..(4): Xaa is C or S
KAXXVPTKLSAISILYL

SEQ ID NO: 11915 - protein, 27 aa, Artificial Sequence
  Cyclic GFR-binding peptide
  MOD_RES (6)..(7): Xaa is C or S
SIPKAXXVPTELNAISMLYFDEYDKVV

SEQ ID NO: 11916 - protein, 14 aa, Artificial Sequence
  Cyclic GFR-binding peptide
  MOD_RES (1)..(1): Xaa is C or S
XTPTKMSAISMLYL

SEQ ID NO: 11917 - protein, 19 aa, Artificial Sequence
  Cyclic GFR-binding peptide
  MOD_RES (5)..(6): Xaa is C or S
SASPXXVPQDLSAISILYL

SEQ ID NO: 11918 - protein, 17 aa, Artificial Sequence
  Cyclic GFR-binding peptide
  MOD_RES (3)..(4): Xaa is C or S
KAXXVPTKLNAISVLYF

SEQ ID NO: 11919 - protein, 16 aa, Artificial Sequence
  Cyclic GFR-binding peptide
LSAISILYLIGKTPKI

SEQ ID NO: 11920 - protein, 15 aa, Artificial Sequence
  Cyclic GFR-binding peptide
  MOD_RES (1)..(2): Xaa is C or S
XXTPTKMNAISMLYF

SEQ ID NO: 11921 - protein, 20 aa, Artificial Sequence
  Cyclic GFR-binding peptide
  MOD_RES (6)..(7): Xaa is C or S
KASKAXXVPTKLSAISILYL

SEQ ID NO: 11922 - protein, 17 aa, Artificial Sequence
  Cyclic GFR-binding peptide
  MOD_RES (4)..(4): Xaa is C or S
KPTXAPTKLSAISVLYL

SEQ ID NO: 11923 - protein, 15 aa, Artificial Sequence
  Cyclic GFR-binding peptide
  MOD_RES (1)..(2): Xaa is C or S
XXVPQDLNAISILYF

SEQ ID NO: 11924 - protein, 18 aa, Artificial Sequence
  Cyclic GFR-binding peptide
  MOD_RES (4)..(5): Xaa is C or S
PEPXXVPEKMNAISILYF

SEQ ID NO: 11925 - protein, 17 aa, Artificial Sequence
  Cyclic GFR-binding peptide
RLNAISILYFDSANNVV

SEQ ID NO: 11926 - protein, 16 aa, Artificial Sequence
  Cyclic GFR-binding peptide
  MOD_RES (2)..(3): Xaa is C or S
TXXVPTRLNAISILYF

SEQ ID NO: 11927 - protein, 20 aa, Artificial Sequence
  Cyclic GFR-binding peptide
  MOD_RES (6)..(7): Xaa is C or S
KIPKAXXVPTELNAISMLYF

SEQ ID NO: 11928 - protein, 17 aa, Artificial Sequence
  Cyclic GFR-binding peptide
ELNAISMLYFDENEKVV

SEQ ID NO: 11929 - protein, 18 aa, Artificial Sequence
  Cyclic GFR-binding peptide
VKTSAISMLYLDNGRVLL

SEQ ID NO: 11930 - protein, 17 aa, Artificial Sequence
  Cyclic GFR-binding peptide
  MOD_RES (3)..(4): Xaa is C or S
KPXXAPTKLSAISVLYL

SEQ ID NO: 11931 - protein, 18 aa, Artificial Sequence
  Cyclic GFR-binding peptide
  MOD_RES (4)..(5): Xaa is C or S
PKAXXAPTKLSAISVLYL

SEQ ID NO: 11932 - protein, 13 aa, Artificial Sequence
  Cyclic GFR-binding peptide
VPTKLNAISILYF

SEQ ID NO: 11933 - protein, 18 aa, Artificial Sequence
  Cyclic GFR-binding peptide
  MOD_RES (4)..(5): Xaa is C or S
AGPXXTPTKMNAISMLYF

SEQ ID NO: 11934 - protein, 15 aa, Artificial Sequence
  Cyclic GFR-binding peptide
  MOD_RES (1)..(2): Xaa is C or S
XXVPTKLNAISILYF

SEQ ID NO: 11935 - protein, 15 aa, Artificial Sequence
  Cyclic GFR-binding peptide
  MOD_RES (1)..(2): Xaa is C or S
XXVPQALNAISILYF

SEQ ID NO: 11936 - protein, 13 aa, Artificial Sequence
  Cyclic GFR-binding peptide
VPQDLSAISILYL

SEQ ID NO: 11937 - protein, 13 aa, Artificial Sequence
  Cyclic GFR-binding peptide
VPQALNAISILYF

SEQ ID NO: 11938 - protein, 18 aa, Artificial Sequence
  Cyclic GFR-binding peptide
VKTNAISMLYFDNGRVLL

SEQ ID NO: 11939 - protein, 19 aa, Artificial Sequence
  Cyclic GFR-binding peptide
PQDLSAISILYLVGRTPKV

SEQ ID NO: 11940 - protein, 16 aa, Artificial Sequence
  Cyclic GFR-binding peptide
TNAISMLYFDNGRVLL

SEQ ID NO: 11941 - protein, 14 aa, Artificial Sequence
  Cyclic GFR-binding peptide
  MOD_RES (1)..(1): Xaa is C or S
XVPQDLSAISILYL

SEQ ID NO: 11942 - protein, 15 aa, Artificial Sequence
  Cyclic GFR-binding peptide
NAISILYFDKGVVTY

SEQ ID NO: 11943 - protein, 18 aa, Artificial Sequence
  Cyclic GFR-binding peptide
  MOD_RES (4)..(5): Xaa is C or S
PKPXXAPTKLSAISVLYL

SEQ ID NO: 11944 - protein, 18 aa, Artificial Sequence
  Cyclic GFR-binding peptide
TELNAISMLYFDEYDKVV

SEQ ID NO: 11945 - protein, 17 aa, Artificial Sequence
  Cyclic GFR-binding peptide
ALNAISILYFVGRKPKV

SEQ ID NO: 11946 - protein, 16 aa, Artificial Sequence
  Cyclic GFR-binding peptide
  MOD_RES (2)..(3): Xaa is C or S
PXXVPEKMSAISILYL

SEQ ID NO: 11947 - protein, 14 aa, Artificial Sequence
  Cyclic GFR-binding peptide
  MOD_RES (1)..(1): Xaa is C or S
XVSQDLNAISILYF

SEQ ID NO: 11948 - protein, 16 aa, Artificial Sequence
  Cyclic GFR-binding peptide
  MOD_RES (2)..(3): Xaa is C or S
PXXVPEKMNAISILYF

SEQ ID NO: 11949 - protein, 14 aa, Artificial Sequence
  Cyclic GFR-binding peptide
  MOD_RES (1)..(1): Xaa is C or S
XVPQDLNAISILYF

SEQ ID NO: 11950 - protein, 13 aa, Artificial Sequence
  Cyclic GFR-binding peptide
VPQDLNAISILYF

SEQ ID NO: 11951 - protein, 15 aa, Artificial Sequence
  Cyclic GFR-binding peptide
  MOD_RES (1)..(2): Xaa is C or S
XXVPTKLSAISILYL

SEQ ID NO: 11952 - protein, 15 aa, Artificial Sequence
  Cyclic GFR-binding peptide
NAISVLYFDSSNNVI

SEQ ID NO: 11953 - protein, 19 aa, Artificial Sequence
  Cyclic GFR-binding peptide
  MOD_RES (5)..(6): Xaa is C or S
VGKAXXVPTKLNAISVLYF

SEQ ID NO: 11954 - protein, 15 aa, Artificial Sequence
  Cyclic GFR-binding peptide
  MOD_RES (1)..(2): Xaa is C or S
XXAPTKLSAISVLYL

SEQ ID NO: 11955 - protein, 17 aa, Artificial Sequence
  Cyclic GFR-binding peptide
RLSAISILYLDAANNVV

SEQ ID NO: 11956 - protein, 19 aa, Artificial Sequence
  Cyclic GFR-binding peptide
PTRLNAISILYFDSANNVV

SEQ ID NO: 11957 - protein, 17 aa, Artificial Sequence
  Cyclic GFR-binding peptide
  MOD_RES (3)..(4): Xaa is C or S
EPXXVPEKMNAISILYF

SEQ ID NO: 11958 - protein, 16 aa, Artificial Sequence
  Cyclic GFR-binding peptide
  MOD_RES (2)..(3): Xaa is C or S
AXXVPTKLNAISVLYF

SEQ ID NO: 11959 - protein, 19 aa, Artificial Sequence
  Cyclic GFR-binding peptide
PARLSAISILYLDAANNVV

SEQ ID NO: 11960 - protein, 17 aa, Artificial Sequence
  Cyclic GFR-binding peptide
  MOD_RES (3)..(4): Xaa is C or S
STXXAPVKTSAISMLYL

SEQ ID NO: 11961 - protein, 18 aa, Artificial Sequence
  Cyclic GFR-binding peptide
  MOD_RES (4)..(5): Xaa is C or S
PKPXXAPTQLSAISVLYL

SEQ ID NO: 11962 - protein, 18 aa, Artificial Sequence
  Cyclic GFR-binding peptide
  MOD_RES (4)..(5): Xaa is C or S
PSTXXAPVKTNAISMLYF

SEQ ID NO: 11963 - protein, 15 aa, Artificial Sequence
  Cyclic GFR-binding peptide
  MOD_RES (1)..(2): Xaa is C or S
XXAPTQLSAISVLYL

SEQ ID NO: 11964 - protein, 18 aa, Artificial Sequence
  Cyclic GFR-binding peptide
TRLSAISILYLDSANNVV

SEQ ID NO: 11965 - protein, 20 aa, Artificial Sequence
  Cyclic GFR-binding peptide
  MOD_RES (6)..(7): Xaa is C or S
ASAAPXXVPQALNAISILYF

SEQ ID NO: 11966 - protein, 19 aa, Artificial Sequence
  Cyclic GFR-binding peptide
  MOD_RES (6)..(6): Xaa is C or S
VTKPTXAPTKLSAISVLYL

SEQ ID NO: 11967 - protein, 20 aa, Artificial Sequence
  Cyclic GFR-binding peptide
  MOD_RES (6)..(7): Xaa is C or S
ASAAPXXVPQALSAISILYL

SEQ ID NO: 11968 - protein, 18 aa, Artificial Sequence
  Cyclic GFR-binding peptide
  MOD_RES (4)..(5): Xaa is C or S
ASPXXVSQDLNAISILYF

SEQ ID NO: 11969 - protein, 16 aa, Artificial Sequence
  Cyclic GFR-binding peptide
  MOD_RES (2)..(3): Xaa is C or S
TXXVPTRLSAISILYL

SEQ ID NO: 11970 - protein, 16 aa, Artificial Sequence
  Cyclic GFR-binding peptide
  MOD_RES (2)..(3): Xaa is C or S
TXXAPVKTNAISMLYF

SEQ ID NO: 11971 - protein, 16 aa, Artificial Sequence
  Cyclic GFR-binding peptide
  MOD_RES (2)..(3): Xaa is C or S
AXXVPTKLSAISVLYL

SEQ ID NO: 11972 - protein, 14 aa, Artificial Sequence
  Cyclic GFR-binding peptide
  MOD_RES (1)..(1): Xaa is C or S
XTPTKMNAISMLYF

SEQ ID NO: 11973 - protein, 15 aa, Artificial Sequence
  Cyclic GFR-binding peptide
NAISILYFVGRTPKV

SEQ ID NO: 11974 - protein, 15 aa, Artificial Sequence
  Cyclic GFR-binding peptide
SAISVLYLDDSSNVI

SEQ ID NO: 11975 - protein, 17 aa, Artificial Sequence
  Cyclic GFR-binding peptide
DLSAISILYLVGRTPKV

SEQ ID NO: 11976 - protein, 17 aa, Artificial Sequence
  Cyclic GFR-binding peptide
KLNAISVLYFDDMGVPT

SEQ ID NO: 11977 - protein, 27 aa, Artificial Sequence
  Cyclic GFR-binding peptide
  MOD_RES (6)..(7): Xaa is C or S
ASAAPXXVPQALNAISILYFVGRKPKV

SEQ ID NO: 11978 - protein, 15 aa, Artificial Sequence
  Cyclic GFR-binding peptide
SAISMLYLDNGRVLL

SEQ ID NO: 11979 - protein, 17 aa, Artificial Sequence
  Cyclic GFR-binding peptide
  MOD_RES (3)..(4): Xaa is C or S
KAXXVPTKLNAISILYF

SEQ ID NO: 11980 - protein, 18 aa, Artificial Sequence
  Cyclic GFR-binding peptide
  MOD_RES (4)..(5): Xaa is C or S
PSTXXAPVKTSAISMLYL

SEQ ID NO: 11981 - protein, 15 aa, Artificial Sequence
  Cyclic GFR-binding peptide
NAISMLYFNDKQQII

SEQ ID NO: 11982 - protein, 18 aa, Artificial Sequence
  Cyclic GFR-binding peptide
TKMSAISMLYLNDKQQII

SEQ ID NO: 11983 - protein, 17 aa, Artificial Sequence
  Cyclic GFR-binding peptide
  MOD_RES (3)..(4): Xaa is C or S
EPXXVPEKMSAISILYL

SEQ ID NO: 11984 - protein, 16 aa, Artificial Sequence
  Cyclic GFR-binding peptide
LNAISILYFDAANNVV

SEQ ID NO: 11985 - protein, 18 aa, Artificial Sequence
  Cyclic GFR-binding peptide
  MOD_RES (5)..(5): Xaa is C or S
TKPTXAPTKLSAISVLYL

SEQ ID NO: 11986 - protein, 16 aa, Artificial Sequence
  Cyclic GFR-binding peptide
  MOD_RES (2)..(3): Xaa is C or S
TXXAPVKTSAISMLYL

SEQ ID NO: 11987 - protein, 18 aa, Artificial Sequence
  Cyclic GFR-binding peptide
  MOD_RES (4)..(5): Xaa is C or S
ASPXXVSQDLSAISILYL

SEQ ID NO: 11988 - protein, 17 aa, Artificial Sequence
  Cyclic GFR-binding peptide
  MOD_RES (3)..(4): Xaa is C or S
KPXXAPTQLSAISVLYL

SEQ ID NO: 11989 - protein, 17 aa, Artificial Sequence
  Cyclic GFR-binding peptide
  MOD_RES (3)..(4): Xaa is C or S
STXXAPVKTNAISMLYF

SEQ ID NO: 11990 - protein, 27 aa, Artificial Sequence
  Cyclic GFR-binding peptide
  MOD_RES (6)..(7): Xaa is C or S
ASASPXXVSQDLNAISILYFIGKTPKI

SEQ ID NO: 11991 - protein, 18 aa, Artificial Sequence
  Cyclic GFR-binding peptide
EKMSAISILYLDENKNVV

SEQ ID NO: 11992 - protein, 17 aa, Artificial Sequence
  Cyclic GFR-binding peptide
DLSAISILYLIGKTPKI

SEQ ID NO: 11993 - protein, 27 aa, Artificial Sequence
  Cyclic GFR-binding peptide
  MOD_RES (6)..(7): Xaa is C or S
STPPTXXVPTRLNAISILYFDSANNVV

SEQ ID NO: 11994 - protein, 19 aa, Artificial Sequence
  Cyclic GFR-binding peptide
PTELNAISMLYFDENEKVV

SEQ ID NO: 11995 - protein, 17 aa, Artificial Sequence
  Cyclic GFR-binding peptide
KLNAISVLYFDSSNNVI

SEQ ID NO: 11996 - protein, 27 aa, Artificial Sequence
  Cyclic GFR-binding peptide
  MOD_RES (6)..(7): Xaa is C or S
KIPKAXXVPTELNAISMLYFDENEKVV

SEQ ID NO: 11997 - protein, 14 aa, Artificial Sequence
  Cyclic GFR-binding peptide
  MOD_RES (1)..(1): Xaa is C or S
XVPQALNAISILYF

SEQ ID NO: 11998 - protein, 16 aa, Artificial Sequence
  Cyclic GFR-binding peptide
  MOD_RES (2)..(3): Xaa is C or S
PXXTPTKMSAISMLYL

SEQ ID NO: 11999 - protein, 13 aa, Artificial Sequence
  Cyclic GFR-binding peptide
VPTKLSAISILYL

SEQ ID NO: 12000 - protein, 17 aa, Artificial Sequence
  Cyclic GFR-binding peptide
KTNAISMLYFDNGRVLL

SEQ ID NO: 12001 - protein, 27 aa, Artificial Sequence
  Cyclic GFR-binding peptide
  MOD_RES (6)..(7): Xaa is C or S
ASASPXXVPQDLNAISILYFVGRTPKV

SEQ ID NO: 12002 - protein, 19 aa, Artificial Sequence
  Cyclic GFR-binding peptide
PTKMNAISMLYFNDKQQII

SEQ ID NO: 12003 - protein, 17 aa, Artificial Sequence
  Cyclic GFR-binding peptide
  MOD_RES (3)..(4): Xaa is C or S
KAXXAPTKLSAISVLYL

SEQ ID NO: 12004 - protein, 18 aa, Artificial Sequence
  Cyclic GFR-binding peptide
EKMNAISILYFDENKNVV

SEQ ID NO: 12005 - protein, 17 aa, Artificial Sequence
  Cyclic GFR-binding peptide
DLNAISILYFIGKTPKI

SEQ ID NO: 12006 - protein, 17 aa, Artificial Sequence
  Cyclic GFR-binding peptide
KTSAISMLYLDNGRVLL

SEQ ID NO: 12007 - protein, 20 aa, Artificial Sequence
  Cyclic GFR-binding peptide
  MOD_RES (6)..(7): Xaa is C or S
GIPEPXXVPEKMNAISILYF

SEQ ID NO: 12008 - protein, 20 aa, Artificial Sequence
  Cyclic GFR-binding peptide
  MOD_RES (6)..(7): Xaa is C or S
AAPASXXVPARLNAISILYF

SEQ ID NO: 12009 - protein, 19 aa, Artificial Sequence
  Cyclic GFR-binding peptide
PTKMSAISMLYLNDKQQII

SEQ ID NO: 12010 - protein, 27 aa, Artificial Sequence
  Cyclic GFR-binding peptide
  MOD_RES (6)..(7): Xaa is C or S
AAPASXXVPARLSAISILYLDAANNVV

SEQ ID NO: 12011 - protein, 19 aa, Artificial Sequence
  Cyclic GFR-binding peptide
  MOD_RES (5)..(6): Xaa is C or S
SAAPXXVPQALNAISILYF

SEQ ID NO: 12012 - protein, 27 aa, Artificial Sequence
  Cyclic GFR-binding peptide
  MOD_RES (6)..(7): Xaa is C or S
STPPTXXVPTRLSAISILYLDSANNVV

SEQ ID NO: 12013 - protein, 19 aa, Artificial Sequence
  Cyclic GFR-binding peptide
PQALSAISILYLVGRKPKV

SEQ ID NO: 12014 - protein, 27 aa, Artificial Sequence
  Cyclic GFR-binding peptide
  MOD_RES (6)..(7): Xaa is C or S
ASASPXXVPQDLSAISILYLVGRTPKV

SEQ ID NO: 12015 - protein, 16 aa, Artificial Sequence
  Cyclic GFR-binding peptide
LNAISMLYFDEYDKVV

SEQ ID NO: 12016 - protein, 18 aa, Artificial Sequence
  Cyclic GFR-binding peptide
  MOD_RES (4)..(5): Xaa is C or S
PASXXVPARLSAISILYL

SEQ ID NO: 12017 - protein, 19 aa, Artificial Sequence
  Cyclic GFR-binding peptide
PTKLNAISVLYFDDMGVPT

SEQ ID NO: 12018 - protein, 18 aa, Artificial Sequence
  Cyclic GFR-binding peptide
  MOD_RES (4)..(5): Xaa is C or S
PEPXXVPEKMSAISILYL

SEQ ID NO: 12019 - protein, 18 aa, Artificial Sequence
  Cyclic GFR-binding peptide
  MOD_RES (4)..(5): Xaa is C or S
AGPXXTPTKMSAISMLYL

SEQ ID NO: 12020 - protein, 16 aa, Artificial Sequence
  Cyclic GFR-binding peptide
LSAISILYLVGRKPKV

SEQ ID NO: 12021 - protein, 16 aa, Artificial Sequence
  Cyclic GFR-binding peptide
LNAISILYFVGRTPKV

SEQ ID NO: 12022 - protein, 13 aa, Artificial Sequence
  Cyclic GFR-binding peptide
VPTKLNAISVLYF

SEQ ID NO: 12023 - protein, 17 aa, Artificial Sequence
  Cyclic GFR-binding peptide
ELNAISMLYFDEYDKVV

SEQ ID NO: 12024 - protein, 19 aa, Artificial Sequence
  Cyclic GFR-binding peptide
  MOD_RES (5)..(6): Xaa is C or S
VPKAXXAPTKLNAISVLYF

SEQ ID NO: 12025 - protein, 27 aa, Artificial Sequence
  Cyclic GFR-binding peptide
  MOD_RES (6)..(7): Xaa is C or S
RVPSTXXAPVKTNAISMLYFDNGRVLL

SEQ ID NO: 12026 - protein, 17 aa, Artificial Sequence
  Cyclic GFR-binding peptide
KLSAISILYLDKGVVTY

SEQ ID NO: 12027 - protein, 18 aa, Artificial Sequence
  Cyclic GFR-binding peptide
TKLSAISVLYLDDSSNVI

SEQ ID NO: 12028 - protein, 14 aa, Artificial Sequence
  Cyclic GFR-binding peptide
  MOD_RES (1)..(1): Xaa is C or S
XAPTKLSAISVLYL

SEQ ID NO: 12029 - protein, 19 aa, Artificial Sequence
  Cyclic GFR-binding peptide
  MOD_RES (5)..(6): Xaa is C or S
VPKPXXAPTKLSAISVLYL

SEQ ID NO: 12030 - protein, 19 aa, Artificial Sequence
  Cyclic GFR-binding peptide
  MOD_RES (5)..(6): Xaa is C or S
IPKAXXVPTELNAISMLYF

SEQ ID NO: 12031 - protein, 17 aa, Artificial Sequence
  Cyclic GFR-binding peptide
  MOD_RES (3)..(4): Xaa is C or S
SPXXVPQDLSAISILYL

SEQ ID NO: 12032 - protein, 27 aa, Artificial Sequence
  Cyclic GFR-binding peptide
  MOD_RES (6)..(7): Xaa is C or S
TVPKPXXAPTQLSAISVLYLDDSSNVI

SEQ ID NO: 12033 - protein, 19 aa, Artificial Sequence
  Cyclic GFR-binding peptide
  MOD_RES (5)..(6): Xaa is C or S
SASPXXVPQDLNAISILYF

SEQ ID NO: 12034 - protein, 27 aa, Artificial Sequence
  Cyclic GFR-binding peptide
  MOD_RES (6)..(7): Xaa is C or S
RVPSTXXAPVKTSAISMLYLDNGRVLL

SEQ ID NO: 12035 - protein, 20 aa, Artificial Sequence
  Cyclic GFR-binding peptide
  MOD_RES (6)..(7): Xaa is C or S
SIPKAXXVPTELNAISMLYF

SEQ ID NO: 12036 - protein, 19 aa, Artificial Sequence
  Cyclic GFR-binding peptide
  MOD_RES (5)..(6): Xaa is C or S
VGKAXXVPTKLSAISVLYL

SEQ ID NO: 12037 - protein, 17 aa, Artificial Sequence
  Cyclic GFR-binding peptide
KLNAISILYFDKGVVTY

SEQ ID NO: 12038 - protein, 18 aa, Artificial Sequence
  Cyclic GFR-binding peptide
TQLSAISVLYLDDSSNVI

SEQ ID NO: 12039 - protein, 17 aa, Artificial Sequence
  Cyclic GFR-binding peptide
KLSAISVLYLDSSNNVI

SEQ ID NO: 12040 - protein, 16 aa, Artificial Sequence
  Cyclic GFR-binding peptide
  MOD_RES (2)..(3): Xaa is C or S
AXXVPTELNAISMLYF

SEQ ID NO: 12041 - protein, 19 aa, Artificial Sequence
  Cyclic GFR-binding peptide
PTKLSAISVLYLDDMGVPT

SEQ ID NO: 12042 - protein, 15 aa, Artificial Sequence
  Cyclic GFR-binding peptide
  MOD_RES (1)..(2): Xaa is C or S
XXVPQDLSAISILYL

SEQ ID NO: 12043 - protein, 27 aa, Artificial Sequence
  Cyclic GFR-binding peptide
  MOD_RES (6)..(7): Xaa is C or S
YVPKPXXAPTKLSAISVLYLDDSSNVI

SEQ ID NO: 12044 - protein, 17 aa, Artificial Sequence
  Cyclic GFR-binding peptide
  MOD_RES (3)..(4): Xaa is C or S
KAXXVPTKLSAISVLYL

SEQ ID NO: 12045 - protein, 20 aa, Artificial Sequence
  Cyclic GFR-binding peptide
  MOD_RES (6)..(7): Xaa is C or S
KASKAXXVPTKLNAISILYF

SEQ ID NO: 12046 - protein, 20 aa, Artificial Sequence
  Cyclic GFR-binding peptide
  MOD_RES (6)..(7): Xaa is C or S
AVPKAXXAPTKLSAISVLYL

SEQ ID NO: 12047 - protein, 19 aa, Artificial Sequence
  Cyclic GFR-binding peptide
PTRLSAISILYLDSANNVV

SEQ ID NO: 12048 - protein, 20 aa, Artificial Sequence
  Cyclic GFR-binding peptide
  MOD_RES (6)..(7): Xaa is C or S
HVPKPXXAPTKLSAISVLYL

SEQ ID NO: 12049 - protein, 19 aa, Artificial Sequence
  Cyclic GFR-binding peptide
PTQLSAISVLYLDDSSNVI

SEQ ID NO: 12050 - protein, 18 aa, Artificial Sequence
  Cyclic GFR-binding peptide
QDLNAISILYFVGRTPKV

SEQ ID NO: 12051 - protein, 18 aa, Artificial Sequence
  Cyclic GFR-binding peptide
ARLSAISILYLDAANNVV

SEQ ID NO: 12052 - protein, 16 aa, Artificial Sequence
  Cyclic GFR-binding peptide
LNAISVLYFDSSNNVI

SEQ ID NO: 12053 - protein, 16 aa, Artificial Sequence
  Cyclic GFR-binding peptide
  MOD_RES (2)..(3): Xaa is C or S
AXXVPTKLSAISILYL

SEQ ID NO: 12054 - protein, 16 aa, Artificial Sequence
  Cyclic GFR-binding peptide
  MOD_RES (2)..(3): Xaa is C or S
AXXAPTKLNAISVLYF

SEQ ID NO: 12055 - protein, 16 aa, Artificial Sequence
  Cyclic GFR-binding peptide
  MOD_RES (2)..(3): Xaa is C or S
AXXVPTKLNAISILYF

SEQ ID NO: 12056 - protein, 17 aa, Artificial Sequence
  Cyclic GFR-binding peptide
  MOD_RES (3)..(4): Xaa is C or S
APXXVPQALSAISILYL

SEQ ID NO: 12057 - protein, 19 aa, Artificial Sequence
  Cyclic GFR-binding peptide
PVKTNAISMLYFDNGRVLL

SEQ ID NO: 12058 - protein, 16 aa, Artificial Sequence
  Cyclic GFR-binding peptide
TSAISMLYLDNGRVLL

SEQ ID NO: 12059 - protein, 19 aa, Artificial Sequence
  Cyclic GFR-binding peptide
PQDLNAISILYFVGRTPKV

SEQ ID NO: 12060 - protein, 15 aa, Artificial Sequence
  Cyclic GFR-binding peptide
  MOD_RES (1)..(2): Xaa is C or S
XXVPTKLSAISVLYL

SEQ ID NO: 12061 - protein, 16 aa, Artificial Sequence
  Cyclic GFR-binding peptide
  MOD_RES (3)..(3): Xaa is C or S
PTXAPTKLSAISVLYL

SEQ ID NO: 12062 - protein, 15 aa, Artificial Sequence
  Cyclic GFR-binding peptide
SAISVLYLDSSNNVI

SEQ ID NO: 12063 - protein, 14 aa, Artificial Sequence
  Cyclic GFR-binding peptide
  MOD_RES (1)..(1): Xaa is C or S
XVSQDLSAISILYL

SEQ ID NO: 12064 - protein, 15 aa, Artificial Sequence
  Cyclic GFR-binding peptide
  MOD_RES (1)..(2): Xaa is C or S
XXVPTKLNAISVLYF

SEQ ID NO: 12065 - protein, 16 aa, Artificial Sequence
  Cyclic GFR-binding peptide
LSAISILYLVGRTPKV

SEQ ID NO: 12066 - protein, 17 aa, Artificial Sequence
  Cyclic GFR-binding peptide
  MOD_RES (3)..(4): Xaa is C or S
ASXXVPARLNAISILYF

SEQ ID NO: 12067 - protein, 16 aa, Artificial Sequence
  Cyclic GFR-binding peptide
  MOD_RES (2)..(3): Xaa is C or S
PXXVPQDLSAISILYL

SEQ ID NO: 12068 - protein, 20 aa, Artificial Sequence
  Cyclic GFR-binding peptide
  MOD_RES (6)..(7): Xaa is C or S
KVGKAXXVPTKLSAISVLYL

SEQ ID NO: 12069 - protein, 20 aa, Artificial Sequence
  Cyclic GFR-binding peptide
  MOD_RES (6)..(7): Xaa is C or S
ASASPXXVSQDLSAISILYL

SEQ ID NO: 12070 - protein, 13 aa, Artificial Sequence
  Cyclic GFR-binding peptide
TPTKMNAISMLYF

SEQ ID NO: 12071 - protein, 20 aa, Artificial Sequence
  Cyclic GFR-binding peptide
  MOD_RES (6)..(7): Xaa is C or S
RVPSTXXAPVKTNAISMLYF

SEQ ID NO: 12072 - protein, 19 aa, Artificial Sequence
  Cyclic GFR-binding peptide
  MOD_RES (5)..(6): Xaa is C or S
ASKAXXVPTKLNAISILYF

SEQ ID NO: 12073 - protein, 18 aa, Artificial Sequence
  Cyclic GFR-binding peptide
  MOD_RES (4)..(5): Xaa is C or S
AAPXXVPQALNAISILYF

SEQ ID NO: 12074 - protein, 17 aa, Artificial Sequence
  Cyclic GFR-binding peptide
ALSAISILYLVGRKPKV

SEQ ID NO: 12075 - protein, 13 aa, Artificial Sequence
  Cyclic GFR-binding peptide
TPTKMSAISMLYL

SEQ ID NO: 12076 - protein, 16 aa, Artificial Sequence
  Cyclic GFR-binding peptide
LSAISILYLDAANNVV

SEQ ID NO: 12077 - protein, 15 aa, Artificial Sequence
  Cyclic GFR-binding peptide
  MOD_RES (1)..(2): Xaa is C or S
XXVSQDLNAISILYF

SEQ ID NO: 12078 - protein, 19 aa, Artificial Sequence
  Cyclic GFR-binding peptide
PQALNAISILYFVGRKPKV

SEQ ID NO: 12079 - protein, 15 aa, Artificial Sequence
  Cyclic GFR-binding peptide
SAISILYLVGRTPKV

SEQ ID NO: 12080 - protein, 14 aa, Artificial Sequence
  Cyclic GFR-binding peptide
  MOD_RES (1)..(1): Xaa is C or S
XVPTRLNAISILYF

SEQ ID NO: 12081 - protein, 14 aa, Artificial Sequence
  Cyclic GFR-binding peptide
  MOD_RES (1)..(1): Xaa is C or S
XVPTRLSAISILYL

SEQ ID NO: 12082 - protein, 27 aa, Artificial Sequence
  Cyclic GFR-binding peptide
  MOD_RES (6)..(7): Xaa is C or S
AAPASXXVPARLNAISILYFDAANNVV

SEQ ID NO: 12083 - protein, 13 aa, Artificial Sequence
  Cyclic GFR-binding peptide
VPTKLSAISVLYL

SEQ ID NO: 12084 - protein, 16 aa, Artificial Sequence
  Cyclic GFR-binding peptide
  MOD_RES (2)..(3): Xaa is C or S
PXXAPTKLSAISVLYL

SEQ ID NO: 12085 - protein, 15 aa, Artificial Sequence
  Cyclic GFR-binding peptide
NAISMLYFDEYDKVV

SEQ ID NO: 12086 - protein, 27 aa, Artificial Sequence
  Cyclic GFR-binding peptide
  MOD_RES (7)..(7): Xaa is C or S
HVTKPTXAPTKLSAISVLYLDDSSNVI

SEQ ID NO: 12087 - protein, 20 aa, Artificial Sequence
  Cyclic GFR-binding peptide
  MOD_RES (6)..(7): Xaa is C or S
ASASPXXVSQDLNAISILYF

SEQ ID NO: 12088 - protein, 19 aa, Artificial Sequence
  Cyclic GFR-binding peptide
  MOD_RES (5)..(6): Xaa is C or S
VPSTXXAPVKTNAISMLYF

SEQ ID NO: 12089 - protein, 18 aa, Artificial Sequence
  Cyclic GFR-binding peptide
TKLSAISVLYLDDMGVPT

SEQ ID NO: 12090 - protein, 15 aa, Artificial Sequence
  Cyclic GFR-binding peptide
  MOD_RES (1)..(2): Xaa is C or S
XXTPTKMSAISMLYL

SEQ ID NO: 12091 - protein, 13 aa, Artificial Sequence
  Cyclic GFR-binding peptide
VSQDLNAISILYF

SEQ ID NO: 12092 - protein, 14 aa, Artificial Sequence
  Cyclic GFR-binding peptide
  MOD_RES (1)..(1): Xaa is C or S
XAPTQLSAISVLYL

SEQ ID NO: 12093 - protein, 16 aa, Artificial Sequence
  Cyclic GFR-binding peptide
MSAISILYLDENKNVV

SEQ ID NO: 12094 - protein, 15 aa, Artificial Sequence
  Cyclic GFR-binding peptide
SAISILYLDKGVVTY

SEQ ID NO: 12095 - protein, 18 aa, Artificial Sequence
  Cyclic GFR-binding peptide
  MOD_RES (4)..(5): Xaa is C or S
ASPXXVPQDLNAISILYF

SEQ ID NO: 12096 - protein, 18 aa, Artificial Sequence
  Cyclic GFR-binding peptide
TKMNAISMLYFNDKQQII

SEQ ID NO: 12097 - protein, 19 aa, Artificial Sequence
  Cyclic GFR-binding peptide
PTKLSAISVLYLDDSSNVI

SEQ ID NO: 12098 - protein, 16 aa, Artificial Sequence
  Cyclic GFR-binding peptide
  MOD_RES (2)..(3): Xaa is C or S
PXXVPQDLNAISILYF

SEQ ID NO: 12099 - protein, 18 aa, Artificial Sequence
  Cyclic GFR-binding peptide
  MOD_RES (4)..(5): Xaa is C or S
PPTXXVPTRLNAISILYF

SEQ ID NO: 12100 - protein, 16 aa, Artificial Sequence
  Cyclic GFR-binding peptide
  MOD_RES (2)..(3): Xaa is C or S
PXXTPTKMNAISMLYF

SEQ ID NO: 12101 - protein, 19 aa, Artificial Sequence
  Cyclic GFR-binding peptide
SQDLSAISILYLIGKTPKI

SEQ ID NO: 12102 - protein, 19 aa, Artificial Sequence
  Cyclic GFR-binding peptide
  MOD_RES (5)..(6): Xaa is C or S
IPEPXXVPEKMNAISILYF

SEQ ID NO: 12103 - protein, 20 aa, Artificial Sequence
  Cyclic GFR-binding peptide
  MOD_RES (6)..(7): Xaa is C or S
GIPEPXXVPEKMSAISILYL

SEQ ID NO: 12104 - protein, 15 aa, Artificial Sequence
  Cyclic GFR-binding peptide
NAISVLYFDDMGVPT

SEQ ID NO: 12105 - protein, 20 aa, Artificial Sequence
  Cyclic GFR-binding peptide
  MOD_RES (6)..(7): Xaa is C or S
AAPASXXVPARLSAISILYL

SEQ ID NO: 12106 - protein, 27 aa, Artificial Sequence
  Cyclic GFR-binding peptide
  MOD_RES (6)..(7): Xaa is C or S
GIPEPXXVPEKMNAISILYFDENKNVV

SEQ ID NO: 12107 - protein, 18 aa, Artificial Sequence
  Cyclic GFR-binding peptide
TELNAISMLYFDENEKVV

SEQ ID NO: 12108 - protein, 19 aa, Artificial Sequence
  Cyclic GFR-binding peptide
  MOD_RES (5)..(6): Xaa is C or S
SASPXXVSQDLNAISILYF

SEQ ID NO: 12109 - protein, 19 aa, Artificial Sequence
  Cyclic GFR-binding peptide
SQDLNAISILYFIGKTPKI

SEQ ID NO: 12110 - protein, 17 aa, Artificial Sequence
  Cyclic GFR-binding peptide
RLSAISILYLDSANNVV

SEQ ID NO: 12111 - protein, 19 aa, Artificial Sequence
  Cyclic GFR-binding peptide
PEKMNAISILYFDENKNVV

SEQ ID NO: 12112 - protein, 18 aa, Artificial Sequence
  Cyclic GFR-binding peptide
QALNAISILYFVGRKPKV

SEQ ID NO: 12113 - protein, 16 aa, Artificial Sequence
  Cyclic GFR-binding peptide
LNAISILYFIGKTPKI

SEQ ID NO: 12114 - protein, 27 aa, Artificial Sequence
  Cyclic GFR-binding peptide
  MOD_RES (6)..(7): Xaa is C or S
KASKAXXVPTKLSAISILYLDKGVVTY

SEQ ID NO: 12115 - protein, 19 aa, Artificial Sequence
  Cyclic GFR-binding peptide
PEKMSAISILYLDENKNVV

SEQ ID NO: 12116 - protein, 20 aa, Artificial Sequence
  Cyclic GFR-binding peptide
  MOD_RES (6)..(7): Xaa is C or S
YVPKPXXAPTKLSAISVLYL

SEQ ID NO: 12117 - protein, 16 aa, Artificial Sequence
  Cyclic GFR-binding peptide
  MOD_RES (2)..(3): Xaa is C or S
PXXVPQALNAISILYF

SEQ ID NO: 12118 - protein, 18 aa, Artificial Sequence
  Cyclic GFR-binding peptide
QALSAISILYLVGRKPKV

SEQ ID NO: 12119 - protein, 14 aa, Artificial Sequence
  Cyclic GFR-binding peptide
  MOD_RES (1)..(1): Xaa is C or S
XVPEKMNAISILYF

SEQ ID NO: 12120 - protein, 17 aa, Artificial Sequence
  Cyclic GFR-binding peptide
  MOD_RES (3)..(4): Xaa is C or S
PTXXVPTRLSAISILYL

SEQ ID NO: 12121 - protein, 19 aa, Artificial Sequence
  Cyclic GFR-binding peptide
  MOD_RES (5)..(6): Xaa is C or S
TPPTXXVPTRLNAISILYF

SEQ ID NO: 12122 - protein, 15 aa, Artificial Sequence
  Cyclic GFR-binding peptide
  MOD_RES (1)..(2): Xaa is C or S
XXVSQDLSAISILYL

SEQ ID NO: 12123 - protein, 20 aa, Artificial Sequence
  Cyclic GFR-binding peptide
  MOD_RES (6)..(7): Xaa is C or S
KVGKAXXVPTKLNAISVLYF

SEQ ID NO: 12124 - protein, 17 aa, Artificial Sequence
  Cyclic GFR-binding peptide
  MOD_RES (3)..(4): Xaa is C or S
GPXXTPTKMNAISMLYF

SEQ ID NO: 12125 - protein, 20 aa, Artificial Sequence
  Cyclic GFR-binding peptide
  MOD_RES (6)..(7): Xaa is C or S
STPPTXXVPTRLNAISILYF

SEQ ID NO: 12126 - protein, 27 aa, Artificial Sequence
  Cyclic GFR-binding peptide
  MOD_RES (6)..(7): Xaa is C or S
KASKAXXVPTKLNAISILYFDKGVVTY

SEQ ID NO: 12127 - protein, 17 aa, Artificial Sequence
  Cyclic GFR-binding peptide
  MOD_RES (3)..(4): Xaa is C or S
ASXXVPARLSAISILYL

SEQ ID NO: 12128 - protein, 13 aa, Artificial Sequence
  Cyclic GFR-binding peptide
VPTRLNAISILYF

SEQ ID NO: 12129 - protein, 19 aa, Artificial Sequence
  Cyclic GFR-binding peptide
  MOD_RES (5)..(6): Xaa is C or S
SAAPXXVPQALSAISILYL

SEQ ID NO: 12130 - protein, 15 aa, Artificial Sequence
  Cyclic GFR-binding peptide
  MOD_RES (1)..(2): Xaa is C or S
XXVPTELNAISMLYF

SEQ ID NO: 12131 - protein, 16 aa, Artificial Sequence
  Cyclic GFR-binding peptide
LNAISILYFDKGVVTY

SEQ ID NO: 12132 - protein, 20 aa, Artificial Sequence
  Cyclic GFR-binding peptide
  MOD_RES (6)..(7): Xaa is C or S
ASASPXXVPQDLSAISILYL

SEQ ID NO: 12133 - protein, 19 aa, Artificial Sequence
  Cyclic GFR-binding peptide
  MOD_RES (5)..(6): Xaa is C or S
ASKAXXVPTKLSAISILYL

SEQ ID NO: 12134 - protein, 16 aa, Artificial Sequence
  Cyclic GFR-binding peptide
LSAISILYLDKGVVTY

SEQ ID NO: 12135 - protein, 14 aa, Artificial Sequence
  Cyclic GFR-binding peptide
  MOD_RES (1)..(1): Xaa is C or S
XVPARLSAISILYL

SEQ ID NO: 12136 - protein, 15 aa, Artificial Sequence
  Cyclic GFR-binding peptide
  MOD_RES (2)..(2): Xaa is C or S
TXAPTKLSAISVLYL

SEQ ID NO: 12137 - protein, 19 aa, Artificial Sequence
  Cyclic GFR-binding peptide
  MOD_RES (5)..(6): Xaa is C or S
SAGPXXTPTKMSAISMLYL

SEQ ID NO: 12138 - protein, 16 aa, Artificial Sequence
  Cyclic GFR-binding peptide
MNAISILYFDENKNVV

SEQ ID NO: 12139 - protein, 15 aa, Artificial Sequence
  Cyclic GFR-binding peptide
  MOD_RES (1)..(2): Xaa is C or S
XXVPTRLSAISILYL

SEQ ID NO: 12140 - protein, 13 aa, Artificial Sequence
  Cyclic GFR-binding peptide
VPTELNAISMLYF

SEQ ID NO: 12141 - protein, 19 aa, Artificial Sequence
  Cyclic GFR-binding peptide
  MOD_RES (5)..(6): Xaa is C or S
SAGPXXTPTKMNAISMLYF

SEQ ID NO: 12142 - protein, 18 aa, Artificial Sequence
  Cyclic GFR-binding peptide
QDLSAISILYLVGRTPKV

SEQ ID NO: 12143 - protein, 18 aa, Artificial Sequence
  Cyclic GFR-binding peptide
ARLNAISILYFDAANNVV

SEQ ID NO: 12144 - protein, 18 aa, Artificial Sequence
  Cyclic GFR-binding peptide
  MOD_RES (4)..(5): Xaa is C or S
SKAXXVPTKLNAISILYF

SEQ ID NO: 12145 - protein, 16 aa, Artificial Sequence
  Cyclic GFR-binding peptide
LSAISVLYLDSSNNVI

SEQ ID NO: 12146 - protein, 15 aa, Artificial Sequence
  Cyclic GFR-binding peptide
SAISILYLVGRKPKV

SEQ ID NO: 12147 - protein, 19 aa, Artificial Sequence
  Cyclic GFR-binding peptide
PVKTSAISMLYLDNGRVLL

SEQ ID NO: 12148 - protein, 15 aa, Artificial Sequence
  Cyclic GFR-binding peptide
  MOD_RES (1)..(2): Xaa is C or S
XXVPTRLNAISILYF

SEQ ID NO: 12149 - protein, 16 aa, Artificial Sequence
  Cyclic GFR-binding peptide
  MOD_RES (2)..(3): Xaa is C or S
PXXVSQDLNAISILYF

SEQ ID NO: 12150 - protein, 16 aa, Artificial Sequence
  Cyclic GFR-binding peptide
LNAISILYFVGRKPKV

SEQ ID NO: 12151 - protein, 14 aa, Artificial Sequence
  Cyclic GFR-binding peptide
  MOD_RES (1)..(1): Xaa is C or S
XVPARLNAISILYF

SEQ ID NO: 12152 - protein, 14 aa, Artificial Sequence
  Cyclic GFR-binding peptide
  MOD_RES (1)..(1): Xaa is C or S
XVPTELNAISMLYF

SEQ ID NO: 12153 - protein, 17 aa, Artificial Sequence
  Cyclic GFR-binding peptide
  MOD_RES (3)..(4): Xaa is C or S
SPXXVSQDLSAISILYL

SEQ ID NO: 12154 - protein, 20 aa, Artificial Sequence
  Cyclic GFR-binding peptide
  MOD_RES (6)..(7): Xaa is C or S
ASASPXXVPQDLNAISILYF

SEQ ID NO: 12155 - protein, 15 aa, Artificial Sequence
  Cyclic GFR-binding peptide
SAISILYLDENKNVV

SEQ ID NO: 12156 - protein, 14 aa, Artificial Sequence
  Cyclic GFR-binding peptide
  MOD_RES (1)..(1): Xaa is C or S
XVPTKLNAISVLYF

SEQ ID NO: 12157 - protein, 19 aa, Artificial Sequence
  Cyclic GFR-binding peptide
PTKLSAISILYLDKGVVTY

SEQ ID NO: 12158 - protein, 16 aa, Artificial Sequence
  Cyclic GFR-binding peptide
LNAISILYFDSANNVV

SEQ ID NO: 12159 - protein, 13 aa, Artificial Sequence
  Cyclic GFR-binding peptide
APVKTSAISMLYL

SEQ ID NO: 12160 - protein, 14 aa, Artificial Sequence
  Cyclic GFR-binding peptide
  MOD_RES (1)..(1): Xaa is C or S
XVPTKLSAISVLYL

SEQ ID NO: 12161 - protein, 15 aa, Artificial Sequence
  Cyclic GFR-binding peptide
NAISMLYFDENEKVV

SEQ ID NO: 12162 - protein, 18 aa, Artificial Sequence
  Cyclic GFR-binding peptide
QDLNAISILYFIGKTPKI

SEQ ID NO: 12163 - protein, 13 aa, Artificial Sequence
  Cyclic GFR-binding peptide
APVKTNAISMLYF

SEQ ID NO: 12164 - protein, 18 aa, Artificial Sequence
  Cyclic GFR-binding peptide
TKLNAISVLYFDDMGVPT

SEQ ID NO: 12165 - protein, 17 aa, Artificial Sequence
  Cyclic GFR-binding peptide
  MOD_RES (3)..(4): Xaa is C or S
PTXXVPTRLNAISILYF

SEQ ID NO: 12166 - protein, 16 aa, Artificial Sequence
  Cyclic GFR-binding peptide
  MOD_RES (2)..(3): Xaa is C or S
PXXVSQDLSAISILYL

SEQ ID NO: 12167 - protein, 15 aa, Artificial Sequence
  Cyclic GFR-binding peptide
  MOD_RES (1)..(2): Xaa is C or S
XXAPVKTSAISMLYL

SEQ ID NO: 12168 - protein, 19 aa, Artificial Sequence
  Cyclic GFR-binding peptide
PTKLSAISVLYLDSSNNVI

SEQ ID NO: 12169 - protein, 18 aa, Artificial Sequence
  Cyclic GFR-binding peptide
  MOD_RES (4)..(5): Xaa is C or S
SKAXXVPTKLSAISILYL

SEQ ID NO: 12170 - protein, 27 aa, Artificial Sequence
  Cyclic GFR-binding peptide
  MOD_RES (6)..(7): Xaa is C or S
GSAGPXXTPTKMNAISMLYFNDKQQII

SEQ ID NO: 12171 - protein, 17 aa, Artificial Sequence
  Cyclic GFR-binding peptide
KMSAISMLYLNDKQQII

SEQ ID NO: 12172 - protein, 17 aa, Artificial Sequence
  Cyclic GFR-binding peptide
KMNAISILYFDENKNVV

SEQ ID NO: 12173 - protein, 18 aa, Artificial Sequence
  Cyclic GFR-binding peptide
  MOD_RES (4)..(5): Xaa is C or S
PPTXXVPTRLSAISILYL

SEQ ID NO: 12174 - protein, 17 aa, Artificial Sequence
  Cyclic GFR-binding peptide
  MOD_RES (3)..(4): Xaa is C or S
SPXXVSQDLNAISILYF

SEQ ID NO: 12175 - protein, 19 aa, Artificial Sequence
  Cyclic GFR-binding peptide
PTELNAISMLYFDEYDKVV

SEQ ID NO: 12176 - protein, 13 aa, Artificial Sequence
  Cyclic GFR-binding peptide
VKAVKVSRLQVQT

SEQ ID NO: 12177 - protein, 20 aa, Artificial Sequence
  Cyclic GFR-binding peptide
HQGQHPKIRIKRMQVPRQGT

SEQ ID NO: 12178 - protein, 13 aa, Artificial Sequence
  Cyclic GFR-binding peptide
IKRMQVPRQGTPV

SEQ ID NO: 12179 - protein, 15 aa, Artificial Sequence
  Cyclic GFR-binding peptide
  MOD_RES (14)..(15): Xaa is C or S
VKAIKVSRLDQSVXX

SEQ ID NO: 12180 - protein, 14 aa, Artificial Sequence
  Cyclic GFR-binding peptide
IKRVQVPRHHVRSP

SEQ ID NO: 12181 - protein, 17 aa, Artificial Sequence
  Cyclic GFR-binding peptide
VKPTRGVIKRIQVPRLD

SEQ ID NO: 12182 - protein, 17 aa, Artificial Sequence
  Cyclic GFR-binding peptide
HQGQHPKIRIKRMQVPR

SEQ ID NO: 12183 - protein, 19 aa, Artificial Sequence
  Cyclic GFR-binding peptide
  MOD_RES (14)..(14): Xaa is C or S
IKRMQVPRQGTPVXELGED

SEQ ID NO: 12184 - protein, 15 aa, Artificial Sequence
  Cyclic GFR-binding peptide
IKPTKGIVKAIKVSR

SEQ ID NO: 12185 - protein, 19 aa, Artificial Sequence
  Cyclic GFR-binding peptide
  MOD_RES (14)..(15): Xaa is C or S
IKRIQVPRLAQPVXXPAAS

SEQ ID NO: 12186 - protein, 14 aa, Artificial Sequence
  Cyclic GFR-binding peptide
  MOD_RES (14)..(14): Xaa is C or S
VKAMKVSREETPVX

SEQ ID NO: 12187 - protein, 16 aa, Artificial Sequence
  Cyclic GFR-binding peptide
  MOD_RES (14)..(15): Xaa is C or S
IKRIQVPRLAQPVXXP

SEQ ID NO: 12188 - protein, 27 aa, Artificial Sequence
  Cyclic GFR-binding peptide
  MOD_RES (21)..(22): Xaa is C or S
VKPTRGVVKAIKVSRLDQPVXXPSASA

SEQ ID NO: 12189 - protein, 16 aa, Artificial Sequence
  Cyclic GFR-binding peptide
IKPTKGIIKRIQVPRL

SEQ ID NO: 12190 - protein, 21 aa, Artificial Sequence
  Cyclic GFR-binding peptide
FIPKKRVIEIKRVQVPRLQVQ

SEQ ID NO: 12191 - protein, 18 aa, Artificial Sequence
  Cyclic GFR-binding peptide
FIPKKRVIEIKRVQVPRL

SEQ ID NO: 12192 - protein, 16 aa, Artificial Sequence
  Cyclic GFR-binding peptide
  MOD_RES (14)..(15): Xaa is C or S
VKAIKVSRLDQPVXXP

SEQ ID NO: 12193 - protein, 16 aa, Artificial Sequence
  Cyclic GFR-binding peptide
IKPTKGIVKAIKVSRL

SEQ ID NO: 12194 - protein, 18 aa, Artificial Sequence
  Cyclic GFR-binding peptide
HQGQHPKIRIKRMQVPRE

SEQ ID NO: 12195 - protein, 20 aa, Artificial Sequence
  Cyclic GFR-binding peptide
  MOD_RES (14)..(15): Xaa is C or S
VKAIKVSRLDQPVXXPSASA

SEQ ID NO: 12196 - protein, 15 aa, Artificial Sequence
  Cyclic GFR-binding peptide
VKPTRGVIKRIQVPR

SEQ ID NO: 12197 - protein, 19 aa, Artificial Sequence
  Cyclic GFR-binding peptide
  MOD_RES (14)..(15): Xaa is C or S
IKRIQVPRLDQSVXXPSAS

SEQ ID NO: 12198 - protein, 17 aa, Artificial Sequence
  Cyclic GFR-binding peptide
FIPKKRVIEIKRVQVPR

SEQ ID NO: 12199 - protein, 29 aa, Artificial Sequence
  Cyclic GFR-binding peptide
  MOD_RES (23)..(23): Xaa is C or S
HQGQHPKIRVKAMKVSRQGTPVXELGEDN

SEQ ID NO: 12200 - protein, 15 aa, Artificial Sequence
  Cyclic GFR-binding peptide
  MOD_RES (14)..(15): Xaa is C or S
VKAIKVSRLDQPVXX

SEQ ID NO: 12201 - protein, 15 aa, Artificial Sequence
  Cyclic GFR-binding peptide
VKAVKVSRLQVQTPR

SEQ ID NO: 12202 - protein, 19 aa, Artificial Sequence
  Cyclic GFR-binding peptide
FIPKKRVIEIKRVQVPRLQ

SEQ ID NO: 12203 - protein, 20 aa, Artificial Sequence
  Cyclic GFR-binding peptide
  MOD_RES (14)..(15): Xaa is C or S
VKAIKVSRLAQPVXXPAASA

SEQ ID NO: 12204 - protein, 15 aa, Artificial Sequence
  Cyclic GFR-binding peptide
IKRVQVPRHHVRSPQ

SEQ ID NO: 12205 - protein, 17 aa, Artificial Sequence
  Cyclic GFR-binding peptide
VKPTRGVVKAIKVSRLD

SEQ ID NO: 12206 - protein, 14 aa, Artificial Sequence
  Cyclic GFR-binding peptide
  MOD_RES (14)..(14): Xaa is C or S
IKRMQVPRQGTPVX

SEQ ID NO: 12207 - protein, 16 aa, Artificial Sequence
  Cyclic GFR-binding peptide
  MOD_RES (14)..(14): Xaa is C or S
VKAMKVSRQGTPVXEL

SEQ ID NO: 12208 - protein, 19 aa, Artificial Sequence
  Cyclic GFR-binding peptide
  MOD_RES (16)..(16): Xaa is C or S
IKRVQVPRHHVRSPQXKVS

SEQ ID NO: 12209 - protein, 15 aa, Artificial Sequence
  Cyclic GFR-binding peptide
  MOD_RES (14)..(15): Xaa is C or S
IKRIQVPRLAQPVXX

SEQ ID NO: 12210 - protein, 17 aa, Artificial Sequence
  Cyclic GFR-binding peptide
LKPKKRVYEVKAVKVSR

SEQ ID NO: 12211 - protein, 29 aa, Artificial Sequence
  Cyclic GFR-binding peptide
  MOD_RES (23)..(23): Xaa is C or S
HQGQHPKIRVKAMKVSREETPVXELGEDN

SEQ ID NO: 12212 - protein, 19 aa, Artificial Sequence
  Cyclic GFR-binding peptide
HQGQHPKIRIKRMQVPREE

SEQ ID NO: 12213 - protein, 17 aa, Artificial Sequence
  Cyclic GFR-binding peptide
IKPTKGIIKRIQVPRLD

SEQ ID NO: 12214 - protein, 20 aa, Artificial Sequence
  Cyclic GFR-binding peptide
  MOD_RES (16)..(16): Xaa is C or S
VKAVKVSRLQVQTPRXQVNR

SEQ ID NO: 12215 - protein, 17 aa, Artificial Sequence
  Cyclic GFR-binding peptide
  MOD_RES (14)..(14): Xaa is C or S
IKRMQVPREETPVXELG

SEQ ID NO: 12216 - protein, 19 aa, Artificial Sequence
  Cyclic GFR-binding peptide
  MOD_RES (14)..(14): Xaa is C or S
VKAMKVSREETPVXELGED

SEQ ID NO: 12217 - protein, 16 aa, Artificial Sequence
  Cyclic GFR-binding peptide
  MOD_RES (14)..(15): Xaa is C or S
VKAIKVSRLDQSVXXP

SEQ ID NO: 12218 - protein, 17 aa, Artificial Sequence
  Cyclic GFR-binding peptide
LKPKKRVYEIKRVQVPR

SEQ ID NO: 12219 - protein, 18 aa, Artificial Sequence
  Cyclic GFR-binding peptide
VKPKRGVVKAIKVSRLAQ

SEQ ID NO: 12220 - protein, 18 aa, Artificial Sequence
  Cyclic GFR-binding peptide
  MOD_RES (14)..(15): Xaa is C or S
IKRIQVPRLDQPVXXPSA

SEQ ID NO: 12221 - protein, 17 aa, Artificial Sequence
  Cyclic GFR-binding peptide
  MOD_RES (14)..(15): Xaa is C or S
IKRIQVPRLDQSVXXPS

SEQ ID NO: 12222 - protein, 20 aa, Artificial Sequence
  Cyclic GFR-binding peptide
HQGQHPKIRVKAMKVSREET

SEQ ID NO: 12223 - protein, 18 aa, Artificial Sequence
  Cyclic GFR-binding peptide
IKPTKGIIKRIQVPRLDQ

SEQ ID NO: 12224 - protein, 19 aa, Artificial Sequence
  Cyclic GFR-binding peptide
LKPKKRVYEVKAVKVSRHH

SEQ ID NO: 12225 - protein, 13 aa, Artificial Sequence
  Cyclic GFR-binding peptide
VKAMKVSREETPV

SEQ ID NO: 12226 - protein, 19 aa, Artificial Sequence
  Cyclic GFR-binding peptide
  MOD_RES (14)..(15): Xaa is C or S
IKRIQVPRLDQPVXXPSAS

SEQ ID NO: 12227 - protein, 17 aa, Artificial Sequence
  Cyclic GFR-binding peptide
IKPTKGIVKAIKVSRLD

SEQ ID NO: 12228 - protein, 20 aa, Artificial Sequence
  Cyclic GFR-binding peptide
  MOD_RES (14)..(14): Xaa is C or S
VKAMKVSREETPVXELGEDN

SEQ ID NO: 12229 - protein, 15 aa, Artificial Sequence
  Cyclic GFR-binding peptide
VKPTRGVVKAIKVSR

SEQ ID NO: 12230 - protein, 16 aa, Artificial Sequence
  Cyclic GFR-binding peptide
  MOD_RES (14)..(14): Xaa is C or S
IKRMQVPREETPVXEL

SEQ ID NO: 12231 - protein, 21 aa, Artificial Sequence
  Cyclic GFR-binding peptide
LKPKKRVYEIKRVQVPRHHVR

SEQ ID NO: 12232 - protein, 18 aa, Artificial Sequence
  Cyclic GFR-binding peptide
  MOD_RES (16)..(16): Xaa is C or S
VKAVKVSRLQVQTPRXQV

SEQ ID NO: 12233 - protein, 29 aa, Artificial Sequence
  Cyclic GFR-binding peptide
  MOD_RES (25)..(25): Xaa is C or S
LKPKKRVYEVKAVKVSRHHVRSPQXKVSS

SEQ ID NO: 12234 - protein, 17 aa, Artificial Sequence
  Cyclic GFR-binding peptide
FIPKKRVIEVKAVKVSR

SEQ ID NO: 12235 - protein, 16 aa, Artificial Sequence
  Cyclic GFR-binding peptide
VKPTRGVVKAIKVSRL

SEQ ID NO: 12236 - protein, 21 aa, Artificial Sequence
  Cyclic GFR-binding peptide
HQGQHPKIRIKRMQVPREETP

SEQ ID NO: 12237 - protein, 18 aa, Artificial Sequence
  Cyclic GFR-binding peptide
  MOD_RES (14)..(15): Xaa is C or S
IKRIQVPRLAQPVXXPAA

SEQ ID NO: 12238 - protein, 20 aa, Artificial Sequence
  Cyclic GFR-binding peptide
LKPKKRVYEIKRVQVPRHHV

SEQ ID NO: 12239 - protein, 20 aa, Artificial Sequence
  Cyclic GFR-binding peptide
HQGQHPKIRVKAMKVSRQGT

SEQ ID NO: 12240 - protein, 17 aa, Artificial Sequence
  Cyclic GFR-binding peptide
HQGQHPKIRVKAMKVSR

SEQ ID NO: 12241 - protein, 15 aa, Artificial Sequence
  Cyclic GFR-binding peptide
  MOD_RES (14)..(14): Xaa is C or S
VKAMKVSRQGTPVXE

SEQ ID NO: 12242 - protein, 21 aa, Artificial Sequence
  Cyclic GFR-binding peptide
HQGQHPKIRVKAMKVSRQGTP

SEQ ID NO: 12243 - protein, 18 aa, Artificial Sequence
  Cyclic GFR-binding peptide
IKPTKGIVKAIKVSRLDQ

SEQ ID NO: 12244 - protein, 17 aa, Artificial Sequence
  Cyclic GFR-binding peptide
  MOD_RES (14)..(15): Xaa is C or S
IKRIQVPRLAQPVXXPA

SEQ ID NO: 12245 - protein, 21 aa, Artificial Sequence
  Cyclic GFR-binding peptide
LKPKKRVYEVKAVKVSRHHVR

SEQ ID NO: 12246 - protein, 18 aa, Artificial Sequence
  Cyclic GFR-binding peptide
HQGQHPKIRIKRMQVPRQ

SEQ ID NO: 12247 - protein, 16 aa, Artificial Sequence
  Cyclic GFR-binding peptide
VKPTRGVIKRIQVPRL

SEQ ID NO: 12248 - protein, 17 aa, Artificial Sequence
  Cyclic GFR-binding peptide
  MOD_RES (14)..(15): Xaa is C or S
VKAIKVSRLAQPVXXPA

SEQ ID NO: 12249 - protein, 13 aa, Artificial Sequence
  Cyclic GFR-binding peptide
VKAIKVSRLDQPV

SEQ ID NO: 12250 - protein, 20 aa, Artificial Sequence
  Cyclic GFR-binding peptide
  MOD_RES (16)..(16): Xaa is C or S
IKRVQVPRHHVRSPQXKVSS

SEQ ID NO: 12251 - protein, 20 aa, Artificial Sequence
  Cyclic GFR-binding peptide
HQGQHPKIRIKRMQVPREET

SEQ ID NO: 12252 - protein, 19 aa, Artificial Sequence
  Cyclic GFR-binding peptide
IKPTKGIIKRIQVPRLDQS

SEQ ID NO: 12253 - protein, 18 aa, Artificial Sequence
  Cyclic GFR-binding peptide
VKPKRGVIKRIQVPRLAQ

SEQ ID NO: 12254 - protein, 15 aa, Artificial Sequence
  Cyclic GFR-binding peptide
  MOD_RES (14)..(14): Xaa is C or S
VKAMKVSREETPVXE

SEQ ID NO: 12255 - protein, 13 aa, Artificial Sequence
  Cyclic GFR-binding peptide
VKAIKVSRLDQSV

SEQ ID NO: 12256 - protein, 14 aa, Artificial Sequence
  Cyclic GFR-binding peptide
  MOD_RES (14)..(14): Xaa is C or S
IKRMQVPREETPVX

SEQ ID NO: 12257 - protein, 19 aa, Artificial Sequence
  Cyclic GFR-binding peptide
  MOD_RES (14)..(14): Xaa is C or S
VKAMKVSRQGTPVXELGED

SEQ ID NO: 12258 - protein, 17 aa, Artificial Sequence
  Cyclic GFR-binding peptide
VKPKRGVIKRIQVPRLA

SEQ ID NO: 12259 - protein, 27 aa, Artificial Sequence
  Cyclic GFR-binding peptide
  MOD_RES (21)..(22): Xaa is C or S
VKPTRGVIKRIQVPRLDQPVXXPSASA

SEQ ID NO: 12260 - protein, 27 aa, Artificial Sequence
  Cyclic GFR-binding peptide
  MOD_RES (21)..(22): Xaa is C or S
VKPKRGVIKRIQVPRLAQPVXXPAASA

SEQ ID NO: 12261 - protein, 15 aa, Artificial Sequence
  Cyclic GFR-binding peptide
VKPKRGVIKRIQVPR

SEQ ID NO: 12262 - protein, 20 aa, Artificial Sequence
  Cyclic GFR-binding peptide
  MOD_RES (14)..(15): Xaa is C or S
VKAIKVSRLDQSVXXPSASA

SEQ ID NO: 12263 - protein, 17 aa, Artificial Sequence
  Cyclic GFR-binding peptide
  MOD_RES (14)..(15): Xaa is C or S
VKAIKVSRLDQPVXXPS

SEQ ID NO: 12264 - protein, 14 aa, Artificial Sequence
  Cyclic GFR-binding peptide
  MOD_RES (14)..(14): Xaa is C or S
IKRIQVPRLAQPVX

SEQ ID NO: 12265 - protein, 19 aa, Artificial Sequence
  Cyclic GFR-binding peptide
IKPTKGIVKAIKVSRLDQS

SEQ ID NO: 12266 - protein, 19 aa, Artificial Sequence
  Cyclic GFR-binding peptide
HQGQHPKIRIKRMQVPRQG

SEQ ID NO: 12267 - protein, 18 aa, Artificial Sequence
  Cyclic GFR-binding peptide
LKPKKRVYEVKAVKVSRH

SEQ ID NO: 12268 - protein, 21 aa, Artificial Sequence
  Cyclic GFR-binding peptide
FIPKKRVIEVKAVKVSRLQVQ

SEQ ID NO: 12269 - protein, 18 aa, Artificial Sequence
  Cyclic GFR-binding peptide
  MOD_RES (14)..(15): Xaa is C or S
IKRIQVPRLDQSVXXPSA

SEQ ID NO: 12270 - protein, 27 aa, Artificial Sequence
  Cyclic GFR-binding peptide
  MOD_RES (21)..(22): Xaa is C or S
VKPKRGVVKAIKVSRLAQPVXXPAASA

SEQ ID NO: 12271 - protein, 19 aa, Artificial Sequence
  Cyclic GFR-binding peptide
  MOD_RES (16)..(16): Xaa is C or S
VKAVKVSRLQVQTPRXQVN

SEQ ID NO: 12272 - protein, 20 aa, Artificial Sequence
  Cyclic GFR-binding peptide
  MOD_RES (14)..(15): Xaa is C or S
IKRIQVPRLDQSVXXPSASA

SEQ ID NO: 12273 - protein, 16 aa, Artificial Sequence
  Cyclic GFR-binding peptide
VKPKRGVIKRIQVPRL

SEQ ID NO: 12274 - protein, 14 aa, Artificial Sequence
  Cyclic GFR-binding peptide
  MOD_RES (14)..(14): Xaa is C or S
VKAMKVSRQGTPVX

SEQ ID NO: 12275 - protein, 16 aa, Artificial Sequence
  Cyclic GFR-binding peptide
  MOD_RES (14)..(15): Xaa is C or S
IKRIQVPRLDQSVXXP

SEQ ID NO: 12276 - protein, 19 aa, Artificial Sequence
  Cyclic GFR-binding peptide
  MOD_RES (14)..(14): Xaa is C or S
IKRMQVPREETPVXELGED

SEQ ID NO: 12277 - protein, 21 aa, Artificial Sequence
  Cyclic GFR-binding peptide
HQGQHPKIRIKRMQVPRQGTP

SEQ ID NO: 12278 - protein, 17 aa, Artificial Sequence
  Cyclic GFR-binding peptide
VKPKRGVVKAIKVSRLA

SEQ ID NO: 12279 - protein, 16 aa, Artificial Sequence
  Cyclic GFR-binding peptide
  MOD_RES (14)..(14): Xaa is C or S
IKRMQVPRQGTPVXEL

SEQ ID NO: 12280 - protein, 20 aa, Artificial Sequence
  Cyclic GFR-binding peptide
  MOD_RES (14)..(15): Xaa is C or S
IKRIQVPRLDQPVXXPSASA

SEQ ID NO: 12281 - protein, 13 aa, Artificial Sequence
  Cyclic GFR-binding peptide
IKRMQVPREETPV

SEQ ID NO: 12282 - protein, 15 aa, Artificial Sequence
  Cyclic GFR-binding peptide
VKPKRGVVKAIKVSR

SEQ ID NO: 12283 - protein, 21 aa, Artificial Sequence
  Cyclic GFR-binding peptide
HQGQHPKIRVKAMKVSREETP

SEQ ID NO: 12284 - protein, 16 aa, Artificial Sequence
  Cyclic GFR-binding peptide
  MOD_RES (14)..(15): Xaa is C or S
VKAIKVSRLAQPVXXP

SEQ ID NO: 12285 - protein, 18 aa, Artificial Sequence
  Cyclic GFR-binding peptide
  MOD_RES (14)..(15): Xaa is C or S
VKAIKVSRLDQSVXXPSA

SEQ ID NO: 12286 - protein, 18 aa, Artificial Sequence
  Cyclic GFR-binding peptide
  MOD_RES (14)..(15): Xaa is C or S
VKAIKVSRLDQPVXXPSA

SEQ ID NO: 12287 - protein, 18 aa, Artificial Sequence
  Cyclic GFR-binding peptide
VKPTRGVVKAIKVSRLDQ

SEQ ID NO: 12288 - protein, 13 aa, Artificial Sequence
  Cyclic GFR-binding peptide
VKAMKVSRQGTPV

SEQ ID NO: 12289 - protein, 17 aa, Artificial Sequence
  Cyclic GFR-binding peptide
  MOD_RES (14)..(15): Xaa is C or S
VKAIKVSRLDQSVXXPS

SEQ ID NO: 12290 - protein, 15 aa, Artificial Sequence
  Cyclic GFR-binding peptide
  MOD_RES (14)..(15): Xaa is C or S
VKAIKVSRLAQPVXX

SEQ ID NO: 12291 - protein, 27 aa, Artificial Sequence
  Cyclic GFR-binding peptide
  MOD_RES (21)..(22): Xaa is C or S
IKPTKGIVKAIKVSRLDQSVXXPSASA

SEQ ID NO: 12292 - protein, 20 aa, Artificial Sequence
  Cyclic GFR-binding peptide
  MOD_RES (14)..(15): Xaa is C or S
IKRIQVPRLAQPVXXPAASA

SEQ ID NO: 12293 - protein, 18 aa, Artificial Sequence
  Cyclic GFR-binding peptide
  MOD_RES (14)..(14): Xaa is C or S
VKAMKVSRQGTPVXELGE

SEQ ID NO: 12294 - protein, 16 aa, Artificial Sequence
  Cyclic GFR-binding peptide
  MOD_RES (16)..(16): Xaa is C or S
VKAVKVSRLQVQTPRX

SEQ ID NO: 12295 - protein, 18 aa, Artificial Sequence
  Cyclic GFR-binding peptide
HQGQHPKIRVKAMKVSRQ

SEQ ID NO: 12296 - protein, 14 aa, Artificial Sequence
  Cyclic GFR-binding peptide
VKAVKVSRLQVQTP

SEQ ID NO: 12297 - protein, 13 aa, Artificial Sequence
  Cyclic GFR-binding peptide
IKRVQVPRHHVRS

SEQ ID NO: 12298 - protein, 14 aa, Artificial Sequence
  Cyclic GFR-binding peptide
  MOD_RES (14)..(14): Xaa is C or S
IKRIQVPRLDQPVX

SEQ ID NO: 12299 - protein, 20 aa, Artificial Sequence
  Cyclic GFR-binding peptide
FIPKKRVIEVKAVKVSRLQV

SEQ ID NO: 12300 - protein, 19 aa, Artificial Sequence
  Cyclic GFR-binding peptide
VKPTRGVVKAIKVSRLDQP

SEQ ID NO: 12301 - protein, 29 aa, Artificial Sequence
  Cyclic GFR-binding peptide
  MOD_RES (23)..(23): Xaa is C or S
HQGQHPKIRIKRMQVPREETPVXELGEDN

SEQ ID NO: 12302 - protein, 15 aa, Artificial Sequence
  Cyclic GFR-binding peptide
  MOD_RES (14)..(15): Xaa is C or S
IKRIQVPRLDQSVXX

SEQ ID NO: 12303 - protein, 20 aa, Artificial Sequence
  Cyclic GFR-binding peptide
FIPKKRVIEIKRVQVPRLQV

SEQ ID NO: 12304 - protein, 29 aa, Artificial Sequence
  Cyclic GFR-binding peptide
  MOD_RES (25)..(25): Xaa is C or S
FIPKKRVIEVKAVKVSRLQVQTPRXQVNR

SEQ ID NO: 12305 - protein, 19 aa, Artificial Sequence
  Cyclic GFR-binding peptide
  MOD_RES (14)..(15): Xaa is C or S
VKAIKVSRLAQPVXXPAAS

SEQ ID NO: 12306 - protein, 29 aa, Artificial Sequence
  Cyclic GFR-binding peptide
  MOD_RES (25)..(25): Xaa is C or S
FIPKKRVIEIKRVQVPRLQVQTPRXQVNR

SEQ ID NO: 12307 - protein, 19 aa, Artificial Sequence
  Cyclic GFR-binding peptide
  MOD_RES (14)..(15): Xaa is C or S
VKAIKVSRLDQSVXXPSAS

SEQ ID NO: 12308 - protein, 19 aa, Artificial Sequence
  Cyclic GFR-binding peptide
VKPTRGVIKRIQVPRLDQP

SEQ ID NO: 12309 - protein, 20 aa, Artificial Sequence
  Cyclic GFR-binding peptide
  MOD_RES (14)..(14): Xaa is C or S
VKAMKVSRQGTPVXELGEDN

SEQ ID NO: 12310 - protein, 16 aa, Artificial Sequence
  Cyclic GFR-binding peptide
  MOD_RES (14)..(15): Xaa is C or S
IKRIQVPRLDQPVXXP

SEQ ID NO: 12311 - protein, 17 aa, Artificial Sequence
  Cyclic GFR-binding peptide
  MOD_RES (14)..(14): Xaa is C or S
VKAMKVSRQGTPVXELG

SEQ ID NO: 12312 - protein, 27 aa, Artificial Sequence
  Cyclic GFR-binding peptide
  MOD_RES (21)..(22): Xaa is C or S
IKPTKGIIKRIQVPRLDQSVXXPSASA

SEQ ID NO: 12313 - protein, 18 aa, Artificial Sequence
  Cyclic GFR-binding peptide
  MOD_RES (14)..(14): Xaa is C or S
IKRMQVPREETPVXELGE

SEQ ID NO: 12314 - protein, 18 aa, Artificial Sequence
  Cyclic GFR-binding peptide
VKPTRGVIKRIQVPRLDQ

SEQ ID NO: 12315 - protein, 13 aa, Artificial Sequence
  Cyclic GFR-binding peptide
IKRIQVPRLAQPV

SEQ ID NO: 12316 - protein, 18 aa, Artificial Sequence
  Cyclic GFR-binding peptide
HQGQHPKIRVKAMKVSRE

SEQ ID NO: 12317 - protein, 14 aa, Artificial Sequence
  Cyclic GFR-binding peptide
  MOD_RES (14)..(14): Xaa is C or S
VKAIKVSRLAQPVX

SEQ ID NO: 12318 - protein, 19 aa, Artificial Sequence
  Cyclic GFR-binding peptide
VKPKRGVVKAIKVSRLAQP

SEQ ID NO: 12319 - protein, 14 aa, Artificial Sequence
  Cyclic GFR-binding peptide
  MOD_RES (14)..(14): Xaa is C or S
VKAIKVSRLDQSVX

SEQ ID NO: 12320 - protein, 18 aa, Artificial Sequence
  Cyclic GFR-binding peptide
  MOD_RES (16)..(16): Xaa is C or S
IKRVQVPRHHVRSPQXKV

SEQ ID NO: 12321 - protein, 18 aa, Artificial Sequence
  Cyclic GFR-binding peptide
  MOD_RES (14)..(14): Xaa is C or S
IKRMQVPRQGTPVXELGE

SEQ ID NO: 12322 - protein, 20 aa, Artificial Sequence
  Cyclic GFR-binding peptide
  MOD_RES (14)..(14): Xaa is C or S
IKRMQVPRQGTPVXELGEDN

SEQ ID NO: 12323 - protein, 13 aa, Artificial Sequence
  Cyclic GFR-binding peptide
IKRIQVPRLDQSV

SEQ ID NO: 12324 - protein, 17 aa, Artificial Sequence
  Cyclic GFR-binding peptide
  MOD_RES (16)..(16): Xaa is C or S
VKAVKVSRLQVQTPRXQ

SEQ ID NO: 12325 - protein, 29 aa, Artificial Sequence
  Cyclic GFR-binding peptide
  MOD_RES (23)..(23): Xaa is C or S
HQGQHPKIRIKRMQVPRQGTPVXELGEDN

SEQ ID NO: 12326 - protein, 17 aa, Artificial Sequence
  Cyclic GFR-binding peptide
  MOD_RES (16)..(16): Xaa is C or S
IKRVQVPRHHVRSPQXK

SEQ ID NO: 12327 - protein, 14 aa, Artificial Sequence
  Cyclic GFR-binding peptide
  MOD_RES (14)..(14): Xaa is C or S
IKRIQVPRLDQSVX

SEQ ID NO: 12328 - protein, 15 aa, Artificial Sequence
  Cyclic GFR-binding peptide
  MOD_RES (14)..(14): Xaa is C or S
IKRMQVPRQGTPVXE

SEQ ID NO: 12329 - protein, 17 aa, Artificial Sequence
  Cyclic GFR-binding peptide
  MOD_RES (14)..(15): Xaa is C or S
IKRIQVPRLDQPVXXPS

SEQ ID NO: 12330 - protein, 20 aa, Artificial Sequence
  Cyclic GFR-binding peptide
  MOD_RES (14)..(14): Xaa is C or S
IKRMQVPREETPVXELGEDN

SEQ ID NO: 12331 - protein, 17 aa, Artificial Sequence
  Cyclic GFR-binding peptide
  MOD_RES (14)..(14): Xaa is C or S
VKAMKVSREETPVXELG

SEQ ID NO: 12332 - protein, 19 aa, Artificial Sequence
  Cyclic GFR-binding peptide
LKPKKRVYEIKRVQVPRHH

SEQ ID NO: 12333 - protein, 18 aa, Artificial Sequence
  Cyclic GFR-binding peptide
  MOD_RES (14)..(15): Xaa is C or S
VKAIKVSRLAQPVXXPAA

SEQ ID NO: 12334 - protein, 17 aa, Artificial Sequence
  Cyclic GFR-binding peptide
  MOD_RES (14)..(14): Xaa is C or S
IKRMQVPRQGTPVXELG

SEQ ID NO: 12335 - protein, 13 aa, Artificial Sequence
  Cyclic GFR-binding peptide
VKAIKVSRLAQPV

SEQ ID NO: 12336 - protein, 15 aa, Artificial Sequence
  Cyclic GFR-binding peptide
IKPTKGIIKRIQVPR

SEQ ID NO: 12337 - protein, 19 aa, Artificial Sequence
  Cyclic GFR-binding peptide
HQGQHPKIRVKAMKVSREE

SEQ ID NO: 12338 - protein, 16 aa, Artificial Sequence
  Cyclic GFR-binding peptide
  MOD_RES (14)..(14): Xaa is C or S
VKAMKVSREETPVXEL

SEQ ID NO: 12339 - protein, 18 aa, Artificial Sequence
  Cyclic GFR-binding peptide
  MOD_RES (14)..(14): Xaa is C or S
VKAMKVSREETPVXELGE

SEQ ID NO: 12340 - protein, 16 aa, Artificial Sequence
  Cyclic GFR-binding peptide
  MOD_RES (16)..(16): Xaa is C or S
IKRVQVPRHHVRSPQX

SEQ ID NO: 12341 - protein, 19 aa, Artificial Sequence
  Cyclic GFR-binding peptide
VKPKRGVIKRIQVPRLAQP

SEQ ID NO: 12342 - protein, 19 aa, Artificial Sequence
  Cyclic GFR-binding peptide
HQGQHPKIRVKAMKVSRQG

SEQ ID NO: 12343 - protein, 19 aa, Artificial Sequence
  Cyclic GFR-binding peptide
  MOD_RES (14)..(15): Xaa is C or S
VKAIKVSRLDQPVXXPSAS

SEQ ID NO: 12344 - protein, 16 aa, Artificial Sequence
  Cyclic GFR-binding peptide
VKPKRGVVKAIKVSRL

SEQ ID NO: 12345 - protein, 18 aa, Artificial Sequence
  Cyclic GFR-binding peptide
LKPKKRVYEIKRVQVPRH

SEQ ID NO: 12346 - protein, 15 aa, Artificial Sequence
  Cyclic GFR-binding peptide
  MOD_RES (14)..(14): Xaa is C or S
IKRMQVPREETPVXE

SEQ ID NO: 12347 - protein, 18 aa, Artificial Sequence
  Cyclic GFR-binding peptide
FIPKKRVIEVKAVKVSRL

SEQ ID NO: 12348 - protein, 20 aa, Artificial Sequence
  Cyclic GFR-binding peptide
LKPKKRVYEVKAVKVSRHHV

SEQ ID NO: 12349 - protein, 13 aa, Artificial Sequence
  Cyclic GFR-binding peptide
IKRIQVPRLDQPV

SEQ ID NO: 12350 - protein, 29 aa, Artificial Sequence
  Cyclic GFR-binding peptide
  MOD_RES (25)..(25): Xaa is C or S
LKPKKRVYEIKRVQVPRHHVRSPQXKVSS

SEQ ID NO: 12351 - protein, 19 aa, Artificial Sequence
  Cyclic GFR-binding peptide
FIPKKRVIEVKAVKVSRLQ

SEQ ID NO: 12352 - protein, 14 aa, Artificial Sequence
  Cyclic GFR-binding peptide
  MOD_RES (14)..(14): Xaa is C or S
VKAIKVSRLDQPVX

SEQ ID NO: 12353 - protein, 15 aa, Artificial Sequence
  Cyclic GFR-binding peptide
  MOD_RES (14)..(15): Xaa is C or S
IKRIQVPRLDQPVXX

SEQ ID NO: 12354 - protein, 13 aa, Artificial Sequence
  Cyclic GFR-binding peptide
TQVQLRSVKVAKV

SEQ ID NO: 12355 - protein, 20 aa, Artificial Sequence
  Cyclic GFR-binding peptide
TGQRPVQMRKIRIKPHQGQH

SEQ ID NO: 12356 - protein, 13 aa, Artificial Sequence
  Cyclic GFR-binding peptide
VPTGQRPVQMRKI

SEQ ID NO: 12357 - protein, 15 aa, Artificial Sequence
  Cyclic GFR-binding peptide
  MOD_RES (1)..(2): Xaa is C or S
XXVSQDLRSVKIAKV

SEQ ID NO: 12358 - protein, 14 aa, Artificial Sequence
  Cyclic GFR-binding peptide
PSRVHHRPVQVRKI

SEQ ID NO: 12359 - protein, 17 aa, Artificial Sequence
  Cyclic GFR-binding peptide
DLRPVQIRKIVGRTPKV

SEQ ID NO: 12360 - protein, 17 aa, Artificial Sequence
  Cyclic GFR-binding peptide
RPVQMRKIRIKPHQGQH

SEQ ID NO: 12361 - protein, 19 aa, Artificial Sequence
  Cyclic GFR-binding peptide
  MOD_RES (6)..(6): Xaa is C or S
DEGLEXVPTGQRPVQMRKI

SEQ ID NO: 12362 - protein, 15 aa, Artificial Sequence
  Cyclic GFR-binding peptide
RSVKIAKVIGKTPKI

SEQ ID NO: 12363 - protein, 19 aa, Artificial Sequence
  Cyclic GFR-binding peptide
  MOD_RES (5)..(6): Xaa is C or S
SAAPXXVPQALRPVQIRKI

SEQ ID NO: 12364 - protein, 14 aa, Artificial Sequence
  Cyclic GFR-binding peptide
  MOD_RES (1)..(1): Xaa is C or S
XVPTEERSVKMAKV

SEQ ID NO: 12365 - protein, 16 aa, Artificial Sequence
  Cyclic GFR-binding peptide
  MOD_RES (2)..(3): Xaa is C or S
PXXVPQALRPVQIRKI

SEQ ID NO: 12366 - protein, 27 aa, Artificial Sequence
  Cyclic GFR-binding peptide
  MOD_RES (6)..(7): Xaa is C or S
ASASPXXVPQDLRSVKIAKVVGRTPKV

SEQ ID NO: 12367 - protein, 16 aa, Artificial Sequence
  Cyclic GFR-binding peptide
LRPVQIRKIIGKTPKI

SEQ ID NO: 12368 - protein, 16 aa, Artificial Sequence
  Cyclic GFR-binding peptide
  MOD_RES (2)..(3): Xaa is C or S
PXXVPQDLRSVKIAKV

SEQ ID NO: 12369 - protein, 16 aa, Artificial Sequence
  Cyclic GFR-binding peptide
LRSVKIAKVIGKTPKI

SEQ ID NO: 12370 - protein, 18 aa, Artificial Sequence
  Cyclic GFR-binding peptide
ERPVQMRKIRIKPHQGQH

SEQ ID NO: 12371 - protein, 20 aa, Artificial Sequence
  Cyclic GFR-binding peptide
  MOD_RES (6)..(7): Xaa is C or S
ASASPXXVPQDLRSVKIAKV

SEQ ID NO: 12372 - protein, 15 aa, Artificial Sequence
  Cyclic GFR-binding peptide
RPVQIRKIVGRTPKV

SEQ ID NO: 12373 - protein, 19 aa, Artificial Sequence
  Cyclic GFR-binding peptide
  MOD_RES (5)..(6): Xaa is C or S
SASPXXVSQDLRPVQIRKI

SEQ ID NO: 12374 - protein, 29 aa, Artificial Sequence
  Cyclic GFR-binding peptide
  MOD_RES (7)..(7): Xaa is C or S
NDEGLEXVPTGQRSVKMAKVRIKPHQGQH

SEQ ID NO: 12375 - protein, 15 aa, Artificial Sequence
  Cyclic GFR-binding peptide
  MOD_RES (1)..(2): Xaa is C or S
XXVPQDLRSVKIAKV

SEQ ID NO: 12376 - protein, 15 aa, Artificial Sequence
  Cyclic GFR-binding peptide
RPTQVQLRSVKVAKV

SEQ ID NO: 12377 - protein, 20 aa, Artificial Sequence
  Cyclic GFR-binding peptide
  MOD_RES (6)..(7): Xaa is C or S
ASAAPXXVPQALRSVKIAKV

SEQ ID NO: 12378 - protein, 15 aa, Artificial Sequence
  Cyclic GFR-binding peptide
QPSRVHHRPVQVRKI

SEQ ID NO: 12379 - protein, 17 aa, Artificial Sequence
  Cyclic GFR-binding peptide
DLRSVKIAKVVGRTPKV

SEQ ID NO: 12380 - protein, 14 aa, Artificial Sequence
  Cyclic GFR-binding peptide
  MOD_RES (1)..(1): Xaa is C or S
XVPTGQRPVQMRKI

SEQ ID NO: 12381 - protein, 16 aa, Artificial Sequence
  Cyclic GFR-binding peptide
  MOD_RES (3)..(3): Xaa is C or S
LEXVPTGQRSVKMAKV

SEQ ID NO: 12382 - protein, 19 aa, Artificial Sequence
  Cyclic GFR-binding peptide
  MOD_RES (4)..(4): Xaa is C or S
SVKXQPSRVHHRPVQVRKI

SEQ ID NO: 12383 - protein, 15 aa, Artificial Sequence
  Cyclic GFR-binding peptide
  MOD_RES (1)..(2): Xaa is C or S
XXVPQALRPVQIRKI

SEQ ID NO: 12384 - protein, 29 aa, Artificial Sequence
  Cyclic GFR-binding peptide
  MOD_RES (7)..(7): Xaa is C or S
NDEGLEXVPTEERSVKMAKVRIKPHQGQH

SEQ ID NO: 12385 - protein, 19 aa, Artificial Sequence
  Cyclic GFR-binding peptide
EERPVQMRKIRIKPHQGQH

SEQ ID NO: 12386 - protein, 17 aa, Artificial Sequence
  Cyclic GFR-binding peptide
DLRPVQIRKIIGKTPKI

SEQ ID NO: 12387 - protein, 20 aa, Artificial Sequence
  Cyclic GFR-binding peptide
  MOD_RES (5)..(5): Xaa is C or S
RNVQXRPTQVQLRSVKVAKV

SEQ ID NO: 12388 - protein, 17 aa, Artificial Sequence
  Cyclic GFR-binding peptide
  MOD_RES (4)..(4): Xaa is C or S
GLEXVPTEERPVQMRKI

SEQ ID NO: 12389 - protein, 19 aa, Artificial Sequence
  Cyclic GFR-binding peptide
  MOD_RES (6)..(6): Xaa is C or S
DEGLEXVPTEERSVKMAKV

SEQ ID NO: 12390 - protein, 16 aa, Artificial Sequence
  Cyclic GFR-binding peptide
  MOD_RES (2)..(3): Xaa is C or S
PXXVSQDLRSVKIAKV

SEQ ID NO: 12391 - protein, 17 aa, Artificial Sequence
  Cyclic GFR-binding peptide
RPVQVRKIEYVRKKPKL

SEQ ID NO: 12392 - protein, 18 aa, Artificial Sequence
  Cyclic GFR-binding peptide
QALRSVKIAKVVGRKPKV

SEQ ID NO: 12393 - protein, 18 aa, Artificial Sequence
  Cyclic GFR-binding peptide
  MOD_RES (4)..(5): Xaa is C or S
ASPXXVPQDLRPVQIRKI

SEQ ID NO: 12394 - protein, 17 aa, Artificial Sequence
  Cyclic GFR-binding peptide
  MOD_RES (3)..(4): Xaa is C or S
SPXXVSQDLRPVQIRKI

SEQ ID NO: 12395 - protein, 20 aa, Artificial Sequence
  Cyclic GFR-binding peptide
TEERSVKMAKVRIKPHQGQH

SEQ ID NO: 12396 - protein, 18 aa, Artificial Sequence
  Cyclic GFR-binding peptide
QDLRPVQIRKIIGKTPKI

SEQ ID NO: 12397 - protein, 13 aa, Artificial Sequence
  Cyclic GFR-binding peptide
VPTEERSVKMAKV

SEQ ID NO: 12398 - protein, 19 aa, Artificial Sequence
  Cyclic GFR-binding peptide
  MOD_RES (5)..(6): Xaa is C or S
SASPXXVPQDLRPVQIRKI

SEQ ID NO: 12399 - protein, 17 aa, Artificial Sequence
  Cyclic GFR-binding peptide
DLRSVKIAKVIGKTPKI

SEQ ID NO: 12400 - protein, 20 aa, Artificial Sequence
  Cyclic GFR-binding peptide
  MOD_RES (7)..(7): Xaa is C or S
NDEGLEXVPTEERSVKMAKV

SEQ ID NO: 12401 - protein, 15 aa, Artificial Sequence
  Cyclic GFR-binding peptide
RSVKIAKVVGRTPKV

SEQ ID NO: 12402 - protein, 16 aa, Artificial Sequence
  Cyclic GFR-binding peptide
  MOD_RES (3)..(3): Xaa is C or S
LEXVPTEERPVQMRKI

SEQ ID NO: 12403 - protein, 21 aa, Artificial Sequence
  Cyclic GFR-binding peptide
RVHHRPVQVRKIEYVRKKPKL

SEQ ID NO: 12404 - protein, 18 aa, Artificial Sequence
  Cyclic GFR-binding peptide
  MOD_RES (3)..(3): Xaa is C or S
VQXRPTQVQLRSVKVAKV

SEQ ID NO: 12405 - protein, 17 aa, Artificial Sequence
  Cyclic GFR-binding peptide
RSVKVAKVEIVRKKPIF

SEQ ID NO: 12406 - protein, 16 aa, Artificial Sequence
  Cyclic GFR-binding peptide
LRSVKIAKVVGRTPKV

SEQ ID NO: 12407 - protein, 21 aa, Artificial Sequence
  Cyclic GFR-binding peptide
PTEERPVQMRKIRIKPHQGQH

SEQ ID NO: 12408 - protein, 18 aa, Artificial Sequence
  Cyclic GFR-binding peptide
  MOD_RES (4)..(5): Xaa is C or S
AAPXXVPQALRPVQIRKI

SEQ ID NO: 12409 - protein, 20 aa, Artificial Sequence
  Cyclic GFR-binding peptide
VHHRPVQVRKIEYVRKKPKL

SEQ ID NO: 12410 - protein, 20 aa, Artificial Sequence
  Cyclic GFR-binding peptide
TGQRSVKMAKVRIKPHQGQH

SEQ ID NO: 12411 - protein, 17 aa, Artificial Sequence
  Cyclic GFR-binding peptide
RSVKMAKVRIKPHQGQH

SEQ ID NO: 12412 - protein, 15 aa, Artificial Sequence
  Cyclic GFR-binding peptide
  MOD_RES (2)..(2): Xaa is C or S
EXVPTGQRSVKMAKV

SEQ ID NO: 12413 - protein, 21 aa, Artificial Sequence
  Cyclic GFR-binding peptide
PTGQRSVKMAKVRIKPHQGQH

SEQ ID NO: 12414 - protein, 18 aa, Artificial Sequence
  Cyclic GFR-binding peptide
QDLRSVKIAKVIGKTPKI

SEQ ID NO: 12415 - protein, 17 aa, Artificial Sequence
  Cyclic GFR-binding peptide
  MOD_RES (3)..(4): Xaa is C or S
APXXVPQALRPVQIRKI

SEQ ID NO: 12416 - protein, 18 aa, Artificial Sequence
  Cyclic GFR-binding peptide
QRPVQMRKIRIKPHQGQH

SEQ ID NO: 12417 - protein, 16 aa, Artificial Sequence
  Cyclic GFR-binding peptide
LRPVQIRKIVGRTPKV

SEQ ID NO: 12418 - protein, 17 aa, Artificial Sequence
  Cyclic GFR-binding peptide
  MOD_RES (3)..(4): Xaa is C or S
APXXVPQALRSVKIAKV

SEQ ID NO: 12419 - protein, 13 aa, Artificial Sequence
  Cyclic GFR-binding peptide
VPQDLRSVKIAKV

SEQ ID NO: 12420 - protein, 20 aa, Artificial Sequence
  Cyclic GFR-binding peptide
  MOD_RES (5)..(5): Xaa is C or S
SSVKXQPSRVHHRPVQVRKI

SEQ ID NO: 12421 - protein, 20 aa, Artificial Sequence
  Cyclic GFR-binding peptide
TEERPVQMRKIRIKPHQGQH

SEQ ID NO: 12422 - protein, 19 aa, Artificial Sequence
  Cyclic GFR-binding peptide
SQDLRPVQIRKIIGKTPKI

SEQ ID NO: 12423 - protein, 18 aa, Artificial Sequence
  Cyclic GFR-binding peptide
QALRPVQIRKIVGRKPKV

SEQ ID NO: 12424 - protein, 15 aa, Artificial Sequence
  Cyclic GFR-binding peptide
  MOD_RES (2)..(2): Xaa is C or S
EXVPTEERSVKMAKV

SEQ ID NO: 12425 - protein, 13 aa, Artificial Sequence
  Cyclic GFR-binding peptide
VSQDLRSVKIAKV

SEQ ID NO: 12426 - protein, 14 aa, Artificial Sequence
  Cyclic GFR-binding peptide
  MOD_RES (1)..(1): Xaa is C or S
XVPTEERPVQMRKI

SEQ ID NO: 12427 - protein, 19 aa, Artificial Sequence
  Cyclic GFR-binding peptide
  MOD_RES (6)..(6): Xaa is C or S
DEGLEXVPTGQRSVKMAKV

SEQ ID NO: 12428 - protein, 17 aa, Artificial Sequence
  Cyclic GFR-binding peptide
ALRPVQIRKIVGRKPKV

SEQ ID NO: 12429 - protein, 27 aa, Artificial Sequence
  Cyclic GFR-binding peptide
  MOD_RES (6)..(7): Xaa is C or S
ASASPXXVPQDLRPVQIRKIVGRTPKV

SEQ ID NO: 12430 - protein, 27 aa, Artificial Sequence
  Cyclic GFR-binding peptide
  MOD_RES (6)..(7): Xaa is C or S
ASAAPXXVPQALRPVQIRKIVGRKPKV

SEQ ID NO: 12431 - protein, 15 aa, Artificial Sequence
  Cyclic GFR-binding peptide
RPVQIRKIVGRKPKV

SEQ ID NO: 12432 - protein, 20 aa, Artificial Sequence
  Cyclic GFR-binding peptide
  MOD_RES (6)..(7): Xaa is C or S
ASASPXXVSQDLRSVKIAKV

SEQ ID NO: 12433 - protein, 17 aa, Artificial Sequence
  Cyclic GFR-binding peptide
  MOD_RES (3)..(4): Xaa is C or S
SPXXVPQDLRSVKIAKV

SEQ ID NO: 12434 - protein, 14 aa, Artificial Sequence
  Cyclic GFR-binding peptide
  MOD_RES (1)..(1): Xaa is C or S
XVPQALRPVQIRKI

SEQ ID NO: 12435 - protein, 19 aa, Artificial Sequence
  Cyclic GFR-binding peptide
SQDLRSVKIAKVIGKTPKI

SEQ ID NO: 12436 - protein, 19 aa, Artificial Sequence
  Cyclic GFR-binding peptide
GQRPVQMRKIRIKPHQGQH

SEQ ID NO: 12437 - protein, 21 aa, Artificial Sequence
  Cyclic GFR-binding peptide
QVQLRSVKVAKVEIVRKKPIF

SEQ ID NO: 12438 - protein, 18 aa, Artificial Sequence
  Cyclic GFR-binding peptide
  MOD_RES (4)..(5): Xaa is C or S
ASPXXVSQDLRPVQIRKI

SEQ ID NO: 12439 - protein, 27 aa, Artificial Sequence
  Cyclic GFR-binding peptide
  MOD_RES (6)..(7): Xaa is C or S
ASAAPXXVPQALRSVKIAKVVGRKPKV

SEQ ID NO: 12440 - protein, 19 aa, Artificial Sequence
  Cyclic GFR-binding peptide
  MOD_RES (4)..(4): Xaa is C or S
NVQXRPTQVQLRSVKVAKV

SEQ ID NO: 12441 - protein, 20 aa, Artificial Sequence
  Cyclic GFR-binding peptide
  MOD_RES (6)..(7): Xaa is C or S
ASASPXXVSQDLRPVQIRKI

SEQ ID NO: 12442 - protein, 16 aa, Artificial Sequence
  Cyclic GFR-binding peptide
LRPVQIRKIVGRKPKV

SEQ ID NO: 12443 - protein, 14 aa, Artificial Sequence
  Cyclic GFR-binding peptide
  MOD_RES (1)..(1): Xaa is C or S
XVPTGQRSVKMAKV

SEQ ID NO: 12444 - protein, 16 aa, Artificial Sequence
  Cyclic GFR-binding peptide
  MOD_RES (2)..(3): Xaa is C or S
PXXVSQDLRPVQIRKI

SEQ ID NO: 12445 - protein, 19 aa, Artificial Sequence
  Cyclic GFR-binding peptide
  MOD_RES (6)..(6): Xaa is C or S
DEGLEXVPTEERPVQMRKI

SEQ ID NO: 12446 - protein, 21 aa, Artificial Sequence
  Cyclic GFR-binding peptide
PTGQRPVQMRKIRIKPHQGQH

SEQ ID NO: 12447 - protein, 17 aa, Artificial Sequence
  Cyclic GFR-binding peptide
ALRSVKIAKVVGRKPKV

SEQ ID NO: 12448 - protein, 16 aa, Artificial Sequence
  Cyclic GFR-binding peptide
  MOD_RES (3)..(3): Xaa is C or S
LEXVPTGQRPVQMRKI

SEQ ID NO: 12449 - protein, 20 aa, Artificial Sequence
  Cyclic GFR-binding peptide
  MOD_RES (6)..(7): Xaa is C or S
ASASPXXVPQDLRPVQIRKI

SEQ ID NO: 12450 - protein, 13 aa, Artificial Sequence
  Cyclic GFR-binding peptide
VPTEERPVQMRKI

SEQ ID NO: 12451 - protein, 15 aa, Artificial Sequence
  Cyclic GFR-binding peptide
RSVKIAKVVGRKPKV

SEQ ID NO: 12452 - protein, 21 aa, Artificial Sequence
  Cyclic GFR-binding peptide
PTEERSVKMAKVRIKPHQGQH

SEQ ID NO: 12453 - protein, 16 aa, Artificial Sequence
  Cyclic GFR-binding peptide
  MOD_RES (2)..(3): Xaa is C or S
PXXVPQALRSVKIAKV

SEQ ID NO: 12454 - protein, 18 aa, Artificial Sequence
  Cyclic GFR-binding peptide
  MOD_RES (4)..(5): Xaa is C or S
ASPXXVSQDLRSVKIAKV

SEQ ID NO: 12455 - protein, 18 aa, Artificial Sequence
  Cyclic GFR-binding peptide
  MOD_RES (4)..(5): Xaa is C or S
ASPXXVPQDLRSVKIAKV

SEQ ID NO: 12456 - protein, 18 aa, Artificial Sequence
  Cyclic GFR-binding peptide
QDLRSVKIAKVVGRTPKV

SEQ ID NO: 12457 - protein, 13 aa, Artificial Sequence
  Cyclic GFR-binding peptide
VPTGQRSVKMAKV

SEQ ID NO: 12458 - protein, 17 aa, Artificial Sequence
  Cyclic GFR-binding peptide
  MOD_RES (3)..(4): Xaa is C or S
SPXXVSQDLRSVKIAKV

SEQ ID NO: 12459 - protein, 15 aa, Artificial Sequence
  Cyclic GFR-binding peptide
  MOD_RES (1)..(2): Xaa is C or S
XXVPQALRSVKIAKV

SEQ ID NO: 12460 - protein, 27 aa, Artificial Sequence
  Cyclic GFR-binding peptide
  MOD_RES (6)..(7): Xaa is C or S
ASASPXXVSQDLRSVKIAKVIGKTPKI

SEQ ID NO: 12461 - protein, 20 aa, Artificial Sequence
  Cyclic GFR-binding peptide
  MOD_RES (6)..(7): Xaa is C or S
ASAAPXXVPQALRPVQIRKI

SEQ ID NO: 12462 - protein, 18 aa, Artificial Sequence
  Cyclic GFR-binding peptide
  MOD_RES (5)..(5): Xaa is C or S
EGLEXVPTGQRSVKMAKV

SEQ ID NO: 12463 - protein, 16 aa, Artificial Sequence
  Cyclic GFR-binding peptide
  MOD_RES (1)..(1): Xaa is C or S
XRPTQVQLRSVKVAKV

SEQ ID NO: 12464 - protein, 18 aa, Artificial Sequence
  Cyclic GFR-binding peptide
QRSVKMAKVRIKPHQGQH

SEQ ID NO: 12465 - protein, 14 aa, Artificial Sequence
  Cyclic GFR-binding peptide
PTQVQLRSVKVAKV

SEQ ID NO: 12466 - protein, 13 aa, Artificial Sequence
  Cyclic GFR-binding peptide
SRVHHRPVQVRKI

SEQ ID NO: 12467 - protein, 14 aa, Artificial Sequence
  Cyclic GFR-binding peptide
  MOD_RES (1)..(1): Xaa is C or S
XVPQDLRPVQIRKI

SEQ ID NO: 12468 - protein, 20 aa, Artificial Sequence
  Cyclic GFR-binding peptide
VQLRSVKVAKVEIVRKKPIF

SEQ ID NO: 12469 - protein, 19 aa, Artificial Sequence
  Cyclic GFR-binding peptide
PQDLRSVKIAKVVGRTPKV

SEQ ID NO: 12470 - protein, 29 aa, Artificial Sequence
  Cyclic GFR-binding peptide
  MOD_RES (7)..(7): Xaa is C or S
NDEGLEXVPTEERPVQMRKIRIKPHQGQH

SEQ ID NO: 12471 - protein, 15 aa, Artificial Sequence
  Cyclic GFR-binding peptide
  MOD_RES (1)..(2): Xaa is C or S
XXVSQDLRPVQIRKI

SEQ ID NO: 12472 - protein, 29 aa, Artificial Sequence
  Cyclic GFR-binding peptide
  MOD_RES (5)..(5): Xaa is C or S
RNVQXRPTQVQLRSVKVAKVEIVRKKPIF

SEQ ID NO: 12473 - protein, 19 aa, Artificial Sequence
  Cyclic GFR-binding peptide
  MOD_RES (5)..(6): Xaa is C or S
SAAPXXVPQALRSVKIAKV

SEQ ID NO: 12474 - protein, 19 aa, Artificial Sequence
  Cyclic GFR-binding peptide
  MOD_RES (5)..(6): Xaa is C or S
SASPXXVSQDLRSVKIAKV

SEQ ID NO: 12475 - protein, 19 aa, Artificial Sequence
  Cyclic GFR-binding peptide
PQDLRPVQIRKIVGRTPKV

SEQ ID NO: 12476 - protein, 20 aa, Artificial Sequence
  Cyclic GFR-binding peptide
  MOD_RES (7)..(7): Xaa is C or S
NDEGLEXVPTGQRSVKMAKV

SEQ ID NO: 12477 - protein, 16 aa, Artificial Sequence
  Cyclic GFR-binding peptide
  MOD_RES (2)..(3): Xaa is C or S
PXXVPQDLRPVQIRKI

SEQ ID NO: 12478 - protein, 17 aa, Artificial Sequence
  Cyclic GFR-binding peptide
  MOD_RES (4)..(4): Xaa is C or S
GLEXVPTGQRSVKMAKV

SEQ ID NO: 12479 - protein, 27 aa, Artificial Sequence
  Cyclic GFR-binding peptide
  MOD_RES (6)..(7): Xaa is C or S
ASASPXXVSQDLRPVQIRKIIGKTPKI

SEQ ID NO: 12480 - protein, 18 aa, Artificial Sequence
  Cyclic GFR-binding peptide
  MOD_RES (5)..(5): Xaa is C or S
EGLEXVPTEERPVQMRKI

SEQ ID NO: 12481 - protein, 18 aa, Artificial Sequence
  Cyclic GFR-binding peptide
QDLRPVQIRKIVGRTPKV

SEQ ID NO: 12482 - protein, 13 aa, Artificial Sequence
  Cyclic GFR-binding peptide
VPQALRPVQIRKI

SEQ ID NO: 12483 - protein, 18 aa, Artificial Sequence
  Cyclic GFR-binding peptide
ERSVKMAKVRIKPHQGQH

SEQ ID NO: 12484 - protein, 14 aa, Artificial Sequence
  Cyclic GFR-binding peptide
  MOD_RES (1)..(1): Xaa is C or S
XVPQALRSVKIAKV

SEQ ID NO: 12485 - protein, 19 aa, Artificial Sequence
  Cyclic GFR-binding peptide
PQALRSVKIAKVVGRKPKV

SEQ ID NO: 12486 - protein, 14 aa, Artificial Sequence
  Cyclic GFR-binding peptide
  MOD_RES (1)..(1): Xaa is C or S
XVSQDLRSVKIAKV

SEQ ID NO: 12487 - protein, 18 aa, Artificial Sequence
  Cyclic GFR-binding peptide
  MOD_RES (3)..(3): Xaa is C or S
VKXQPSRVHHRPVQVRKI

SEQ ID NO: 12488 - protein, 18 aa, Artificial Sequence
  Cyclic GFR-binding peptide
  MOD_RES (5)..(5): Xaa is C or S
EGLEXVPTGQRPVQMRKI

SEQ ID NO: 12489 - protein, 20 aa, Artificial Sequence
  Cyclic GFR-binding peptide
  MOD_RES (7)..(7): Xaa is C or S
NDEGLEXVPTGQRPVQMRKI

SEQ ID NO: 12490 - protein, 13 aa, Artificial Sequence
  Cyclic GFR-binding peptide
VSQDLRPVQIRKI

SEQ ID NO: 12491 - protein, 17 aa, Artificial Sequence
  Cyclic GFR-binding peptide
  MOD_RES (2)..(2): Xaa is C or S
QXRPTQVQLRSVKVAKV

SEQ ID NO: 12492 - protein, 29 aa, Artificial Sequence
  Cyclic GFR-binding peptide
  MOD_RES (7)..(7): Xaa is C or S
NDEGLEXVPTGQRPVQMRKIRIKPHQGQH

SEQ ID NO: 12493 - protein, 17 aa, Artificial Sequence
  Cyclic GFR-binding peptide
  MOD_RES (2)..(2): Xaa is C or S
KXQPSRVHHRPVQVRKI

SEQ ID NO: 12494 - protein, 14 aa, Artificial Sequence
  Cyclic GFR-binding peptide
  MOD_RES (1)..(1): Xaa is C or S
XVSQDLRPVQIRKI

SEQ ID NO: 12495 - protein, 15 aa, Artificial Sequence
  Cyclic GFR-binding peptide
  MOD_RES (2)..(2): Xaa is C or S
EXVPTGQRPVQMRKI

SEQ ID NO: 12496 - protein, 17 aa, Artificial Sequence
  Cyclic GFR-binding peptide
  MOD_RES (3)..(4): Xaa is C or S
SPXXVPQDLRPVQIRKI

SEQ ID NO: 12497 - protein, 20 aa, Artificial Sequence
  Cyclic GFR-binding peptide
  MOD_RES (7)..(7): Xaa is C or S
NDEGLEXVPTEERPVQMRKI

SEQ ID NO: 12498 - protein, 17 aa, Artificial Sequence
  Cyclic GFR-binding peptide
  MOD_RES (4)..(4): Xaa is C or S
GLEXVPTEERSVKMAKV

SEQ ID NO: 12499 - protein, 19 aa, Artificial Sequence
  Cyclic GFR-binding peptide
HHRPVQVRKIEYVRKKPKL

SEQ ID NO: 12500 - protein, 18 aa, Artificial Sequence
  Cyclic GFR-binding peptide
  MOD_RES (4)..(5): Xaa is C or S
AAPXXVPQALRSVKIAKV

SEQ ID NO: 12501 - protein, 17 aa, Artificial Sequence
  Cyclic GFR-binding peptide
  MOD_RES (4)..(4): Xaa is C or S
GLEXVPTGQRPVQMRKI

SEQ ID NO: 12502 - protein, 13 aa, Artificial Sequence
  Cyclic GFR-binding peptide
VPQALRSVKIAKV

SEQ ID NO: 12503 - protein, 15 aa, Artificial Sequence
  Cyclic GFR-binding peptide
RPVQIRKIIGKTPKI

SEQ ID NO: 12504 - protein, 19 aa, Artificial Sequence
  Cyclic GFR-binding peptide
EERSVKMAKVRIKPHQGQH

SEQ ID NO: 12505 - protein, 16 aa, Artificial Sequence
  Cyclic GFR-binding peptide
  MOD_RES (3)..(3): Xaa is C or S
LEXVPTEERSVKMAKV

SEQ ID NO: 12506 - protein, 18 aa, Artificial Sequence
  Cyclic GFR-binding peptide
  MOD_RES (5)..(5): Xaa is C or S
EGLEXVPTEERSVKMAKV

SEQ ID NO: 12507 - protein, 16 aa, Artificial Sequence
  Cyclic GFR-binding peptide
  MOD_RES (1)..(1): Xaa is C or S
XQPSRVHHRPVQVRKI

SEQ ID NO: 12508 - protein, 19 aa, Artificial Sequence
  Cyclic GFR-binding peptide
PQALRPVQIRKIVGRKPKV

SEQ ID NO: 12509 - protein, 19 aa, Artificial Sequence
  Cyclic GFR-binding peptide
GQRSVKMAKVRIKPHQGQH

SEQ ID NO: 12510 - protein, 19 aa, Artificial Sequence
  Cyclic GFR-binding peptide
  MOD_RES (5)..(6): Xaa is C or S
SASPXXVPQDLRSVKIAKV

SEQ ID NO: 12511 - protein, 16 aa, Artificial Sequence
  Cyclic GFR-binding peptide
LRSVKIAKVVGRKPKV

SEQ ID NO: 12512 - protein, 18 aa, Artificial Sequence
  Cyclic GFR-binding peptide
HRPVQVRKIEYVRKKPKL

SEQ ID NO: 12513 - protein, 15 aa, Artificial Sequence
  Cyclic GFR-binding peptide
  MOD_RES (2)..(2): Xaa is C or S
EXVPTEERPVQMRKI

SEQ ID NO: 12514 - protein, 18 aa, Artificial Sequence
  Cyclic GFR-binding peptide
LRSVKVAKVEIVRKKPIF

SEQ ID NO: 12515 - protein, 13 aa, Artificial Sequence
  Cyclic GFR-binding peptide
VPQDLRPVQIRKI

SEQ ID NO: 12516 - protein, 29 aa, Artificial Sequence
  Cyclic GFR-binding peptide
  MOD_RES (5)..(5): Xaa is C or S
SSVKXQPSRVHHRPVQVRKIEYVRKKPKL

SEQ ID NO: 12517 - protein, 19 aa, Artificial Sequence
  Cyclic GFR-binding peptide
QLRSVKVAKVEIVRKKPIF

SEQ ID NO: 12518 - protein, 14 aa, Artificial Sequence
  Cyclic GFR-binding peptide
  MOD_RES (1)..(1): Xaa is C or S
XVPQDLRSVKIAKV

SEQ ID NO: 12519 - protein, 15 aa, Artificial Sequence
  Cyclic GFR-binding peptide
  MOD_RES (1)..(2): Xaa is C or S
XXVPQDLRPVQIRKI

SEQ ID NO: 12520 - protein, 7 aa, Artificial Sequence
  Building block peptide "PEP"
  MOD_RES (6)..(7): Xaa is C or S
KIPKAXX

SEQ ID NO: 12521 - protein, 7 aa, Artificial Sequence
  Building block peptide "PEP"
  MOD_RES (6)..(7): Xaa is C or S
GIPEPXX

SEQ ID NO: 12522 - protein, 7 aa, Artificial Sequence
  Building block peptide "PEP"
  MOD_RES (6)..(7): Xaa is C or S
SIPKAXX

SEQ ID NO: 12523 - protein, 7 aa, Artificial Sequence
  Building block peptide "PEP"
  MOD_RES (7)..(7): Xaa is C or S
HVTKPTX

SEQ ID NO: 12524 - protein, 7 aa, Artificial Sequence
  Building block peptide "PEP"
  MOD_RES (6)..(7): Xaa is C or S
YVPKPXX

SEQ ID NO: 12525 - protein, 7 aa, Artificial Sequence
  Building block peptide "PEP"
  MOD_RES (6)..(7): Xaa is C or S
TVPKPXX

SEQ ID NO: 12526 - protein, 7 aa, Artificial Sequence
  Building block peptide "PEP"
  MOD_RES (6)..(7): Xaa is C or S
AVPKAXX

SEQ ID NO: 12527 - protein, 7 aa, Artificial Sequence
  Building block peptide "PEP"
  MOD_RES (6)..(7): Xaa is C or S
KVGKAXX

SEQ ID NO: 12528 - protein, 7 aa, Artificial Sequence
  Building block peptide "PEP"
  MOD_RES (6)..(7): Xaa is C or S
KASKAXX

SEQ ID NO: 12529 - protein, 7 aa, Artificial Sequence
  Building block peptide "PEP"
  MOD_RES (6)..(7): Xaa is C or S
GSAGPXX

SEQ ID NO: 12530 - protein, 7 aa, Artificial Sequence
  Building block peptide "PEP"
  MOD_RES (6)..(7): Xaa is C or S
AAPASXX

SEQ ID NO: 12531 - protein, 7 aa, Artificial Sequence
  Building block peptide "PEP"
  MOD_RES (6)..(7): Xaa is C or S
STPPTXX

SEQ ID NO: 12532 - protein, 7 aa, Artificial Sequence
  Building block peptide "PEP"
  MOD_RES (6)..(7): Xaa is C or S
HVPKPXX

SEQ ID NO: 12533 - protein, 7 aa, Artificial Sequence
  Building block peptide "PEP"
  MOD_RES (6)..(7): Xaa is C or S
RVPSTXX

SEQ ID NO: 12534 - protein, 7 aa, Artificial Sequence
  Building block peptide "PEP"
  MOD_RES (6)..(7): Xaa is C or S
ASAAPXX

SEQ ID NO: 12535 - protein, 7 aa, Artificial Sequence
  Building block peptide "PEP"
  MOD_RES (6)..(7): Xaa is C or S
ASASPXX

SEQ ID NO: 12536 - protein, 7 aa, Artificial Sequence
  Building block peptide "PEP"
  MOD_RES (7)..(7): Xaa is C or S
NDEGLEX

SEQ ID NO: 12537 - protein, 7 aa, Artificial Sequence
  Building block peptide "PEP"
  MOD_RES (5)..(5): Xaa is C or S
SSVKXQP

SEQ ID NO: 12538 - protein, 7 aa, Artificial Sequence
  Building block peptide "PEP"
  MOD_RES (5)..(5): Xaa is C or S
RNVQXRP

SEQ ID NO: 12539 - protein, 4 aa, Artificial Sequence
  Building block peptide "PEP"
SAIS

SEQ ID NO: 12540 - protein, 4 aa, Artificial Sequence
  Building block peptide "PEP"
SSLS

SEQ ID NO: 12541 - protein, 4 aa, Artificial Sequence
  Building block peptide "PEP"
NAIS

SEQ ID NO: 12542 - protein, 4 aa, Artificial Sequence
  Building block peptide "PEP"
SATS

SEQ ID NO: 12543 - protein, 4 aa, Artificial Sequence
  Building block peptide "PEP"
SPIS

SEQ ID NO: 12544 - protein, 4 aa, Artificial Sequence
  Building block peptide "PEP"
EPIS

SEQ ID NO: 12545 - protein, 4 aa, Artificial Sequence
  Building block peptide "PEP"
SPIN

SEQ ID NO: 12546 - protein, 4 aa, Artificial Sequence
  Building block peptide "PEP"
KPLS

SEQ ID NO: 12547 - protein, 4 aa, Artificial Sequence
  Building block peptide "PEP"
EPLP

SEQ ID NO: 12548 - protein, 4 aa, Artificial Sequence
  Building block peptide "PEP"
EPLT

SEQ ID NO: 12549 - protein, 4 aa, Artificial Sequence
  Building block peptide "PEP"
SNIT

SEQ ID NO: 12550 - protein, 4 aa, Artificial Sequence
  Building block peptide "PEP"
RSVK

SEQ ID NO: 12551 - protein, 4 aa, Artificial Sequence
  Building block peptide "PEP"
RPVQ

SEQ ID NO: 12552 - protein, 7 aa, Artificial Sequence
  Building block peptide "PEP"
DENEKVV

SEQ ID NO: 12553 - protein, 7 aa, Artificial Sequence
  Building block peptide "PEP"
DENKNVV

SEQ ID NO: 12554 - protein, 7 aa, Artificial Sequence
  Building block peptide "PEP"
DEYDKVV

SEQ ID NO: 12555 - protein, 7 aa, Artificial Sequence
  Building block peptide "PEP"
DDSSNVI

SEQ ID NO: 12556 - protein, 7 aa, Artificial Sequence
  Building block peptide "PEP"
DSSNNVI

SEQ ID NO: 12557 - protein, 7 aa, Artificial Sequence
  Building block peptide "PEP"
DDMGVPT

SEQ ID NO: 12558 - protein, 7 aa, Artificial Sequence
  Building block peptide "PEP"
DKGVVTY

SEQ ID NO: 12559 - protein, 7 aa, Artificial Sequence
  Building block peptide "PEP"
NDKQQII

SEQ ID NO: 12560 - protein, 7 aa, Artificial Sequence
  Building block peptide "PEP"
DAANNVV

SEQ ID NO: 12561 - protein, 7 aa, Artificial Sequence
  Building block peptide "PEP"
DSANNVV

SEQ ID NO: 12562 - protein, 7 aa, Artificial Sequence
  Building block peptide "PEP"
DNGRVLL

SEQ ID NO: 12563 - protein, 7 aa, Artificial Sequence
  Building block peptide "PEP"
VGRKPKV

SEQ ID NO: 12564 - protein, 7 aa, Artificial Sequence
  Building block peptide "PEP"
IGKTPKI

SEQ ID NO: 12565 - protein, 7 aa, Artificial Sequence
  Building block peptide "PEP"
VGRTPKV

SEQ ID NO: 12566 - protein, 9 aa, Artificial Sequence
  Building block peptide "PEP"
RIKPHQGQH

SEQ ID NO: 12567 - protein, 9 aa, Artificial Sequence
  Building block peptide "PEP"
EYVRKKPKL

SEQ ID NO: 12568 - protein, 9 aa, Artificial Sequence
  Building block peptide "PEP"
EIVRKKPIF
